(19) United States
(12) Patent Application Publication
(10) Pub. No.: US 2006/0141528 A1
(43) Pub. Date: Jun. 29, 2006

(54) Compositions and methods for quantification of serum glycoproteins

(76) Inventors: Rudolf H. Aebersold, Zurich (CH); Hui Zhang, Seattle, WA (US)

Correspondence Address: MCDERMOTT, WILL & EMERY, 4370 LA JOLLA VILLAGE DRIVE, SUITE 700, SAN DIEGO, CA, 92122, US

(21) Appl. No.: 11/134,871

(22) Filed: May 20, 2005

Related U.S. Application Data
(60) Provisional application No. 60/573,593, filed on May 21, 2004.

(51) Int. Cl. G01N 33/53; C12Q 1/37

(52) U.S. Cl. 435/7.1; 435/23

(57) ABSTRACT

The invention provides compositions and methods for identifying and/or quantifying glycopolypeptides from human serum or plasma. The compositions and methods include a plurality of standard peptides containing glycosylation sites determined for human serum/plasma proteins.

[0001] This application claims the benefit of priority of U.S. Provisional application Ser. No. 60/573,593, filed May 21, 2004, the entire contents of which is incorporated herein by reference.

[0002] This invention was made in part, with government support under grant number NO1-HV-28179 awarded by the National Heart, Lung, and Blood Institute, National Institutes of Health, under Contract No. N01-HV-28179 and from grant number R33 from the National Cancer Institute. The government has certain rights in the invention.

### BACKGROUND OF THE INVENTION

[0003] The present invention relates generally to the field of proteomics and more specifically to quantitative analysis of blood, plasma or serum glycoproteins.

[0004] Complete genomic sequences and large partial (EST) sequence databases potentially identify every gene in a species. However, the sequences alone do not explain the mechanism of biological and clinical processes because they do not explain how the genes and their products cooperate to carry out a specific process or function. Furthermore, the gene sequence does not predict the amount or the activity of the protein products nor does it answer the questions of whether, how, and at what position(s) a protein may be modified.

[0005] Quantitative protein profiling has been recognized as an important approach for profiling the physiological state or pathological state of cells or organisms. Specific expectations of quantitative protein profiles include the possibility to detect diagnostic and prognostic disease markers, to discover proteins as therapeutic targets or to learn about basic biological mechanisms.

[0006] Not only do the amounts and type of proteins expressed vary in different pathological states, post-translational modifications of proteins also vary depending on the physiological or pathological state of cells or organisms. Thus, it is important to be able to profile the amount and types of expressed proteins as well as protein modifications.

[0007] Glycosylation has long been recognized as the most common post-translational modification affecting the functions of proteins, such as protein stability, enzymatic activity and protein-protein interactions. Differential glycosylation is a major source of protein microheterogeneity. Glycoproteins play key roles in cell communication, signaling and cell adhesion. Changes in carbohydrates in cell surface and body fluid are demonstrated in cancer and other disease states and highlights their importance. However, studies on protein glycosylation have been complicated by the diverse structure of protein glycans and the lack of effective tools to identify the glycosylation site(s) on proteins and of glycan structures. Oligosaccharides can be linked to serine or threonine residues (O-glycosylation) or to asparagine residues (N-glycosylation), and glycoproteins can have different oligosaccharides attached to any given possible site(s).

[0008] Among the many post-translation modifications of proteins, glycosylation is a modification that is common to proteins that are exposed to an extracellular environment. For example, proteins expressed on the surface of a cell are exposed to the external environment such as blood or surrounding tissue. Similarly, proteins that are secreted from a cell, for example, into the bloodstream, are commonly glycosylated.

[0009] Proteins secreted by cells or shed from the cell surface, including hormones, lymphokines, interferons, transferrin, antibodies, proteases, protease inhibitors, and other factors, perform critical functions with respect to the physiological activity of an organism. Examples of physiologically important secreted proteins include the interferons, lymphokines, protein and peptide hormones. Aberrant availability of such proteins can have grave clinical consequences. It is therefore apparent that the ability to precisely quantitatively profile secreted proteins would be of great importance for the discovery of the mechanisms regulating a wide variety of physiological processes in health and disease and for diagnostic or prognostic purposes. Such secreted proteins are present in body fluids such as blood serum and plasma, cerebrospinal fluid, urine, lung lavage, breast milk, pancreatic juice, and saliva. For example, the presence of increased levels of prostate-specific antigen has been used as a diagnostic marker for prostate cancer. Furthermore, the use of agonists or antagonists or the replacement of soluble secreted proteins is an important mode of therapy for a wide range of diseases.

[0010] Quantitative proteomics requires the analysis of complex protein samples. In the case of clinical diagnosis, the ability to obtain appropriate specimens for clinical analysis is important for ease and accuracy of diagnosis. As discussed above, a number of biologically important molecules are secreted and are therefore present in body fluids such as blood and serum, cerebrospinal fluid, saliva, and the like. In addition to the presence of important biological molecules, body fluids also provide an attractive specimen source because body fluids are generally readily accessible and available in reasonable quantities for clinical analysis. It is therefore apparent that a general method for the quantitative analysis of the proteins contained in body fluids in health and disease would be of great diagnostic and clinical importance.

[0011] A key problem with the proteomic analysis of serum and many other body fluids is the peculiar protein composition of these specimens. The protein composition is dominated by a few proteins that are extraordinarily abundant, with albumin alone representing 50% of the total plasma proteins. Due to the abundance of these major proteins as well as the presence of multiple modified forms of these abundant proteins, the large number of protein species of lower abundance are obscured or inaccessible by traditional proteomics analysis methods such as two-dimensional electrophoresis (2DE).

[0012] Proteins secreted and present in body fluids have in common a high propensity for being glycosylated, that is, modified post translationally with a carbohydrate structure of varying complexity at one or several amino acid residues. Thus, the analysis of glycoproteins allows characterization of important biological molecules.

[0013] Thus, there exists a need for methods of high throughput and quantitative analysis of blood, serum or plasma glycoproteins and glycoprotein profiling for diagnostic purposes. The present invention satisfies this need and provides related advantages as well.

### SUMMARY OF INVENTION

[0014] The invention provides compositions and methods for identifying and/or quantifying glycopolypeptides from human serum or plasma. The compositions and methods include a plurality of standard peptides containing glycosylation sites determined for human serum/plasma proteins.

### BRIEF DESCRIPTION OF THE DRAWINGS

[0015] FIG. 1 shows oxidation of a carbohydrate to an aldehyde followed by covalent coupling to hydrazide beads.

[0016] FIG. 2 shows representative chemical reagents that have been tested and proven to be able to label amino groups of glycopeptides. The structures of labeled peptides are shown in the right column.

[0017] FIG. 3 shows the chemistry and schematic diagram of isotopically labeling the N-termini of immobilized glycopeptides by attaching differentially isotopically labeled forms of the amino acid phenylalanine (Phe) to their N-termini.

[0018] FIG. 4 shows a schematic of quantitative analysis of serum proteins.

[0019] FIG. 5 shows an exemplary analysis with the addition of a standard peptide.

[0020] FIG. 6 shows a diagram of a procedure for glycopeptide profiling of serum proteins using liquid chromatograpy-mass spetrometry (LC-MS).

[0021] FIG. 7 shows the ratio of peptides identified without NXS/T glycosylation motif as a function of peptide identification stringency. The fraction of peptides identified with (center bar) or without (right bar) glycosylation consensus motif are shown for different PeptideProphet (Keller et al., Anal. Chem. 74:5383-5392 (2002)) probabilities. The false positive error rates were estimated by PeptideProphet are indicated (left bar).

[0022] FIG. 8 shows the reproducibility of the high throughput serum analysis method. Distribution of coefficient of variance (CV) from 9 repeated LC-MS analyses of the same glycopeptide mixture (rectangles), and distribution of CV from 4 repeated sample preparations using glycopeptide capture-and-release method and LC-MS analysis (squares) are shown.

[0023] FIG. 9 shows identification of peptides exhibiting increased abundance in treated cancer-bearing mice. FIG. 9A shows normalized abundances of the peptide at m/z value of 709.7 observed in sera of normal (N1a, N1b, N2) and cancer-bearing mice (C1, C2, C3), determined by LC-MS analysis. FIG. 9B shows validation of differential abundance of the same peptide shown in FIG. 9A using isotopic labeling of N-termini.

[0024] FIG. 10 shows a schematic illustration of an offline LC-MALDI TOF/TOF based platform for proteome-screening technology.

[0025] FIG. 11 shows a search and identification of a specific spike-native peptide pair in a complex background. The native peptide was consistently identified in different runs using the spike-in stable isotope labeled peptide as a search criterion, even though the peptides were deposited on different spot positions in different runs.

[0026] FIG. 12 shows the complementary approach for peptide identification using specific mass match and peptide sequencing. The search of a specific mass resulted in more than one precursor ion locating at different spot positions. Both of the precursor ions were submitted for MS/MS analysis. The one with the higher intensity, distributing across spot 133 to 138, was identified as the targeted peptide.

[0027] FIG. 13 shows an exemplary analysis using a method of the invention. FIG. 13A shows the base peak chromatogram of a glycopeptide mixture spiked with stable isotope labeled peptides. The sample was fractionated in 192 wells on a MALD plate. Each point on the x-axis indicates a spot position. The elution of the majority of the peptides was between spot 45 and 165. FIG. 13B shows the MS spectrum of a representative spot.

[0028] FIG. 14A shows the number of precursor ions detected in each spot in MS mode. FIG. 14B shows the elution profile of the spike-in stable isotope labeled peptides extracted from the complex background. The elution profile of a spiked peptide was used to locate the spot position(s) containing the peptide.

[0029] FIG. 15 shows the identification of a targeted peptide with low abundance in a complex serum glycopeptide mixture. The pair of the spike-in and native peaks was located and identified using specific mass search against the MS data. The validation of the peptide sequence was accomplished using MS/MS analysis and database searching.

[0030] FIG. 16 shows a quantitative profile of the selected peptides detected in 4 different serum samples (1S2, 1F2, 3S1, 3F1). The x axis represents the peptide mass. The y axis indicates the abundance ratio of a native peptide to the corresponding spike-in stable isotope labeled peptide. The peptides and their corresponding proteins are listed in Table 6.

[0031] FIG. 17 shows a protein network analysis of changes in glycoprotein expression in prostate cancer tissue.

[0032] FIGS. 18A and 18B shows the amino acid preferences around N-linked glycosylation sites.

[0033] FIG. 19 shows a representative output of proteotypic N-linked glycopeptides from a database using UniPep.

[0034] FIG. 20 shows reproducible CID spectra generated from light and heavy isoforms of the same peptide sequence.

### DETAILED DESCRIPTION OF THE INVENTION

[0035] The invention provides methods for quantitative profiling of glycoproteins and glycopeptides on a proteome-wide scale. The methods of the invention can be used to determine changes in the abundance of glycoproteins and changes in the state of glycosylation at individual glycosylation sites on those glycoproteins that occur in response to perturbations of biological systems and organisms in health and disease.

[0036] Because the methods of the invention are directed to isolating glypolypeptides, the methods also reduce the complexity of analysis since many proteins and fragments of glycoproteins do not contain carbohydrate, which can simplify the analysis of complex biological samples such as serum, plasma or blood. The methods of the invention are advantageous for the determination of protein glycosylation in glycome studies and can be used to isolate and identify glycoproteins from serum, plasma or blood to determine specific glycoprotein changes related to certain disease states or cancer. The methods of the invention can be used for detecting quantitative changes in protein samples containing glycoproteins and to detect their extent of glycosylation. The methods of the invention are applicable for the identification and/or characterization of diagnostic biomarkers, immunotherapy, or other diagnositic or therapeutic applications. The methods of the invention can also be used to evaluate the effectiveness of drugs during drug development, optimal dosing, toxicology, drug targeting, and related therapeutic applications.

[0037] The invention uses methods for identifying and/or quantifying glycopolypeptides in a blood, plasma or serum sample, in particular a human blood, plasma or serum sample. The methods of the invention can also be used to identify and/or quantify glycopolypeptides in other biological fluids. Methods for quantifying glycoproteins have been described previously (see, for example, Zhang et al., Nat. Biotechnol. 21:660-666 (2003); Aebersold and Zhang, U.S. publication 2004/0023306, each of which is incorporated herein by reference.

[0038] In one embodiment, the invention provides a method for identifying glycopolypeptides in a serum, plasma or blood sample. The method can include the steps of (a) derivatizing glycopolypeptides in the sample; (b) immobilizing the derivatized sample glycopolypeptides to a solid support; (c) cleaving the immobilized sample glycopolypeptides, thereby releasing non-glycosylated peptide fragments and retaining immobilized sample glycopeptide fragments; (d) labeling the immobilized sample glycopeptide fragments with an isotope tag; (e) releasing the sample glycopeptide fragments from the solid support, thereby generating released sample glycopeptide fragments; (f) adding to the released sample glycopeptide fragments a plurality of standard peptides selected from peptides containing the glycosylation sites shown in Tables 7 (SEQ ID NOS:1-3244), 8 (SEQ ID NOS:3245-3369) or 10 (SEQ ID NOS:3370-3517) and referenced as SEQ ID NOS:1-3517, wherein the standard peptides correspond to peptides derivatized as in step (a), cleaved as in step (c), and released as in step (e), and wherein the standard peptides are differentially labeled with a corresponding isotope tag as used in step (d); (g) analyzing the released sample glycopeptide fragments using mass spectrometry; and (h) identifying released sample glycopeptide fragments that correspond to standard peptides added in step (f). The method can further comprise quantifying the amount of the sample glycopeptide fragments identified in step (h).

[0039] As used herein, a plurality of standard peptides refers to a selection of 2 or more peptides containing the glycosylation sites listed in Tables 7, 8 and/or 10. A plurality of standard peptides can include, for example, 3 or more, 5 or more, 10 or more, 20 or more, 30 or more, 40 or more, 50 or more, 60 or more, 70 or more, 80 or more, 90 or more, 100 or more, 110 or more, 120 or more, 130 or more, 140 or more, 150 or more, 160 or more, 170 or more, 180 or more, 190 or more, 200 or more, 220 or more, 250 or more, 270 or more, 300 or more, 350 or more, 400 or more, 450 or more, 500 or more, 600 or more, 700 or more, 800 or more, 900 or more, 1000 or more or more, 2000 or more, or even up to all of the glycosylation sites listed in Tables 7, 8 and/or 10. In a particular embodiment, the plurality of standard peptides contains about 100 or more, about 110 or more, about 120 or more, about 130 or more, about 140 or more, about 150 or more, about 160 or more, about 170 or more, about 180 or more, about 190 or more, about 200 or more, about 220 or more, about 250 or more, about 270 or more, about 300 or more, about 350 or more, about 400 or more, about 450 or more, about 500 or more, about 600 or more, about 700 or more, about 800 or more, about 900 or more, or about 1000 or more peptides containing the glycosylation sites listed in Tables 7, 8 and/or 10. It is understood that when the plurality of standard peptides contains less than about 90 or about 80 peptides, the plurality of standard peptides specifically excludes peptides containing previously known glycosylation sites.

[0040] As disclosed herein, a number of N-linked glycosylated peptides have been identified in human plasma/serum, including those having the consensus N-X-S/T glycosylation motif (Table 7) and peptides that do not contain the consensus N-X-S/T motif (Table 8). It is understood that the sequences shown in Tables 7, 8 and 10 represent glycosylation sites and that the standard peptides referred to herein need only include the glycosylation sites but need not contain the exact sequences shown in Tables 7, 8 and/or 10, so long as the selected standard peptides correspond to peptides cleaved with the same cleavage reagent. For example, the first glycosylation site shown in Table 7 (SEQ ID NO:1) contains a glycosylated Asn at position 11 of the shown sequence. A standard peptide containing the glycosylation site referenced in SEQ ID NO:1 can be, for example a peptide from Glu 2 to Lys 21 or Val 9 to Lys 21 if cleaved with trypsin (trypsin peptide), which cleaves on the carboxyl side of Lys or Arg. Both peptides are potential trypsin peptides since cleavage with proteases is not be 100% efficient at every cleavage site. Additionally, a standard peptide containing the glycosylation site referenced as SEQ ID NO:1 can be, for example, Phe 2 to Glu 15 if cleaved with Staphylococcus aureus protease (sap peptide), which cleaves on the carboxyl side of Asp or Glu. Thus a plurality of standard peptides containing the glycosylation site of SEQ ID NO:1 and corresponding to trypsin cleaved peptides can contain one or both of the trypsin peptides indicated above, whereas a plurality of standard paptides containing the glycosylation site of SEQ ID NO:1 and corresponding to Staphylococcus aureus protease can contain the sap peptide indicated above. Other proteases can also be used to generate protease specific peptides as desired and disclosed herein.

[0041] As used herein, a peptide that “corresponds” to a referenced condition means that the peptide has the same chemistry as if the referenced condition had been performed on the peptide. For example, if a sample peptide is derivatized, for example, by oxidation, cleaved with a particular cleavage reagent, and released from a solid support, the standard peptide is synthesized, either by the same process or using well known chemical synthesis methods, so that the standard peptide has identical chemistry except for any differential labeling due to the incorporation of an isotope tag. Because the standard and sample peptides are generally analyzed by MS and use identical chemistry except for any differential isotope labeling, the standard peptides are synthesized so that they have identical chemistry as the sample peptides to be analyzed.

[0042] In methods of the invention, the particular cleavage reagent used for the standard peptides can be selected by one skilled in the art based on a desired use. The standard peptides are synthesized so that the peptides incorporate the same resulting cleavage chemistry as selected for the sample peptides. In the case of generating the standard peptides, the peptides can be synthesized as longer peptides and cleaved with a desired reagent or can be synthesized as a desired sequence, so long as the resulting standard peptide would have the same product as though cleaved with the reagent used to cleave the sample glycopolypeptides. In methods of the invention in which the sample peptides are to be quantified, a predetermined amount of the standard peptide can be added for comparison and quantification (see, for example, Gygi et al., Nature Biotechnol. 17:994-999 (1999); WO 00/11208).

[0043] In a particular embodiment of a method of the invention, the solid support can comprise a hydrazide moiety. In another embodiment of a method of the invention, the glycopeptides are released from the solid support using a glycosidase, for example, an N-glycosidase or an O-glycosidase. In still another embodiment of a method of the invention, the glycopeptides can be released from the solid using sequential addition of N-glycosidase and O-glycosidase. In yet another embodiment, the glycopeptides can be released from the solid support using chemical cleavage.

[0044] In one embodiment of a method of the invention, the glycopolypeptides can be oxidized with periodate. In still another embodiment of the invention, the glycopolypeptides can be cleaved with a protease, for example, trypsin.

[0045] In another embodiment, the invention provides a method for identifying glycopolypeptides in a serum sample. The method can include the steps of (a) immobilizing the sample glycopolypeptides to a solid support; (b) cleaving the immobilized sample glycopolypeptides, thereby releasing non-glycosylated peptide fragments and retaining immobilized sample glycopeptide fragments; (c) labeling the immobilized sample glycopeptide fragments with an isotope tag; (d) releasing the sample glycopeptide fragments from the solid support, thereby generating released sample glycopeptide fragments; (e) adding to the released sample glycopeptide fragments a plurality of standard peptides selected from peptides containing the glycosylation sites shown in Tables 7, 8 and/or 10 and referenced as SEQ ID NOS: 1-3482, wherein the standard peptides correspond to peptides cleaved as in step (b), and released as in step (d), and wherein the standard peptides are differentially labeled with a corresponding isotope tag as used in step (c); (f) analyzing the released sample glycopeptide fragments using mass spectrometry; and (g) identifying released sample glycopeptide fragments that correspond to standard peptides added in step (e). Such a method can further comprise quantifying the amount of the sample glycopeptide fragments identified in step (g).

[0046] In yet another embodiment, the invention provides a method for identifying and quantifying glycopolypeptides in a control serum or plasma sample. The method can include the steps of (a) derivatizing glycopolypeptides in a control serum sample; (b) immobilizing the derivatized sample glycopolypeptides to a solid support; (c) cleaving the immobilized sample glycopolypeptides, thereby releasing non-glycosylated peptide fragments and retaining immobilized sample glycopeptide fragments; (d) labeling the immobilized sample glycopeptide fragments with an isotope tag; (e) releasing the sample glycopeptide fragments from the solid support, thereby generating released sample glycopeptide fragments; (f) adding to the released sample glycopeptide fragments a plurality of standard peptides selected from peptides containing the glycosylation sites shown in Tables 7, 8 and/or 10 and referenced as SEQ ID NOS: 1-3482, wherein the standard peptides correspond to peptides derivatized as in step (a), cleaved as in step (c), and released as in step (e), and wherein the standard peptides are differentially labeled with a corresponding isotope tag as used in step (d); (g) analyzing the released sample glycopeptide fragments using mass spectrometry; (h) identifying released sample glycopeptide fragments that correspond to standard peptides added in step (f); and (i) quantifying the amount of the sample glycopeptide fragments identified in step (h). The control serum sample can be normal serum or plasma obtained from a healthy individual or individuals.

[0047] In an additional embodiment, the invention provides a method for identifying one or more diagnostic markers for a disease. The method can include the steps of (a) derivatizing glycopolypeptides in a serum sample from an individual having a disease; (b) immobilizing the derivatized sample glycopolypeptides to a solid support; (c) cleaving the immobilized sample glycopolypeptides, thereby releasing non-glycosylated peptide fragments and retaining immobilized sample glycopeptide fragments; (d) labeling the immobilized sample glycopeptide fragments with an isotope tag; (e) releasing the sample glycopeptide fragments from the solid support, thereby generating released sample glycopeptide fragments; (f) adding to the released sample glycopeptide fragments a predetermined amount of a plurality of standard peptides selected from peptides containing the glycosylation sites shown in Tables 7, 8 and/or 10 and referenced as SEQ ID NOS: 1-3482, wherein the standard peptides correspond to peptides derivatized as in step (a), cleaved as in step (c), and released as in step (e), and wherein the standard peptides are differentially labeled with a corresponding isotope tag as used in step (d); (g) analyzing the released sample glycopeptide fragments using mass spectrometry; (h) identifying released sample glycopeptide fragments that correspond to standard peptides added in step (f); (i) quantifying the amount of the sample glycopeptide fragments identified in step (h); and (j) comparing the amount of the sample glycopeptide fragments determined in step (i) to the amount of the same glycopeptide fragments determined in a normal serum sample. It is understood that the methods disclosed herein in which a glycopolypeptide sample is derivatized can also be performed in the absence of derivatization so long as the glycopolypeptides can be captured. An example of such a capture method includes lectin, antibody or affinity chromatography. In a particular embodiment, the disease is cancer.

[0048] In still another embodiment, the invention provides a method for identifying glycopeptides in a serum sample. The method can include the steps of (a) immobilizing glycopolypeptides from a serum sample to a solid support; (b) cleaving the immobilized sample glycopolypeptides, thereby releasing non-glycosylated peptide fragments and retaining immobilized sample glycopeptide fragments; (c) labeling the immobilized sample glycopeptide fragments with an isotope tag; (d) releasing the sample glycopeptide fragments from the solid support; (e) adding to the released sample glycopeptide fragments a plurality of standard peptides selected from peptides containing the glycosylation sites shown in Tables 7, 8 and/or 10 and referenced as SEQ ID NOS: 1-3482, wherein the standard peptides correspond to peptides cleaved as in step (b) and released as in step (d), and wherein the standard peptides are differentially labeled with a corresponding isotope tag as used in step (c); and (f) analyzing the released sample glycopeptide fragments.

[0049] In one embodiment, the cis-diol groups of carbohydrates in glycoproteins can be oxidized by periodate oxidation to give aldehydes, which are reactive to a hydrazide gel with an solid support to form covalent hydrazone bonds. The immobilized glycoproteins are subjected to protease digestion followed by extensive washing to remove the non-glycosylated peptides. The immobilized glycopeptides are released from beads by chemicals or glycosidases. The isolated peptides are analyzed by mass spectrometry (MS), and the glycopeptide sequence and corresponding proteins are identified by MS/MS combined with a database search. The glycopeptides can also be isotopically labeled, for example, at the amino or carboxyl termini to allow the quantities of glycopeptides from different biological samples to be compared.

[0050] The methods of the invention are based on selectively isolating glycosylated peptides, or peptides that were glycosylated in the original protein sample, from a complex sample. The sample consists of peptide fragments of proteins generated, for example, by enzymatic digestion or chemical cleavage. A stable isotope tag can be introduced into the isolated peptide fragments to facilitate mass spectrometric analysis and accurate quantification of the peptide fragments.

[0051] In one embodiment, a sample containing glycopolypeptides is chemically modified so that carbohydrates of the glycopolypeptides in the sample can be selectively bound to a solid support. For example, the glycopolypeptides can be bound covalently to a solid support by chemically modifying the carbohydrate so that the carbohydrate can covalently bind to a reactive group on a solid support. The carbohydrates of the sample glycopolypeptides are oxidized. The carbohydrate can be oxidized, for example, to aldehydes. The oxidized moiety, such as an aldehyde moiety, of the glycopolypeptides can react with a solid support containing hydrazide or amine moieties, allowing covalent attachment of glycosylated polypeptides to a solid support via hydrazine chemistry. The sample glycopolypeptides are immobilized through the chemically modified carbohydrate, for example, the aldehyde, allowing the removal of non-glycosylated sample proteins by washing of the solid support. If desired, the immobilized glycopolypeptides can be denatured and/or reduced. The immobilized glycopolypeptides are cleaved into fragments using either protease or chemical cleavage. Cleavage results in the release of peptide fragments that do not contain carbohydrate and are therefore not immobilized. These released non-glycosylated peptide fragments optionally can be further characterized, if desired.

[0052] Following cleavage, glycosylated peptide fragments (glycopeptide fragments) remain bound to the solid support. To facilitate quantitative mass spectrometry (MS) analysis, immobilized glycopeptide fragments can be isotopically labeled. If it is desired to characterize most or all of the immobilized glycopeptide fragments, the isotope tagging reagent contains an amino or carboxyl reactive group so that the N-terminus or C-terminus of the glycopeptide fragments can be labeled (see FIGS. 2 and 3). The immobilized glycopeptide fragments can be cleaved from the solid support chemically or enzymatically, for example, using glycosidases such as N-glycanase (N-glycosidase) or O-glycanase (O-glycosidase). The released glycopeptide fragments or their deglycosylated forms can be analyzed, for example, using MS.

[0053] As used herein, the term “polypeptide” refers to a peptide or polypeptide of two or more amino acids. A polypeptide can also be modified by naturally occurring modifications such as post-translational modifications, including phosphorylation, fatty acylation, prenylation, sulfation, hydroxylation, acetylation, addition of carbohydrate, addition of prosthetic groups or cofactors, formation of disulfide bonds, proteolysis, assembly into macromolecular complexes, and the like. A “peptide fragment” is a peptide of two or more amino acids, generally derived from a larger polypeptide.

[0054] As used herein, a “glycopolypeptide” or “glycoprotein” refers to a polypeptide that contains a covalently bound carbohydrate group. The carbohydrate can be a monosaccharide, oligosaccharide or polysaccharide. Proteoglycans are included within the meaning of “glycopolypeptide.” A glycopolypeptide can additionally contain other post-translational modifications. A “glycopeptide” refers to a peptide that contains covalently bound carbohydrate. A “glycopeptide fragment” refers to a peptide fragment resulting from enzymatic or chemical cleavage of a larger polypeptide in which the peptide fragment retains covalently bound carbohydrate. It is understood that a glycopeptide fragment or peptide fragment refers to the peptides that result from a particular cleavage reaction, regardless of whether the resulting peptide was present before or after the cleavage reaction. Thus, a peptide that does not contain a cleavage site will be present after the cleavage reaction and is considered to be a peptide fragment resulting from that particular cleavage reaction. For example, if bound glycopeptides are cleaved, the resulting cleavage products retaining bound carbohydrate are considered to be glycopeptide fragments. The glycosylated fragments can remain bound to the solid support, and such bound glycopeptide fragments are considered to include those fragments that were not cleaved due to the absence of a cleavage site.

[0055] As disclosed herein, a glycopolypeptide or glycopeptide can be processed such that the carbohydrate is removed from the parent glycopolypeptide. It is understood that such an originally glycosylated polypeptide is still referred to herein as a glycopolypeptide or glycopeptide even if the carbohydrate is removed enzymatically and/or chemically. Thus, a glycopolypeptide or glycopeptide can refer to a glycosylated or de-glycosylated form of a polypeptide. A glycopolypeptide or glycopeptide from which the carbohydrate is removed is referred to as the de-glycosylated form of a polypeptide whereas a glycopolypeptide or glycopeptide which retains its carbohydrate is referred to as the glycosylated form of a polypeptide.

[0056] As used herein, the term “sample” is intended to mean any biological fluid, cell, tissue, organ or portion thereof, that includes one or more different molecules such as nucleic acids, polypeptides, or small molecules. A sample can be a tissue section obtained by biopsy, or cells that are placed in or adapted to tissue culture. A sample can also be a biological fluid specimen such as blood, serum or plasma, cerebrospinal fluid, urine, saliva, seminal plasma, pancreatic juice, breast milk, lung lavage, and the like. A sample can additionally be a cell extract from any species, including prokaryotic and eukaryotic cells as well as viruses. A tissue or biological fluid specimen can be further fractionated, if desired, to a fraction containing particular cell types. As used herein, a “serum sample” refers to the fluid portion of the blood obtained after removal of the fibrin clot and blood cells. As used herein, a “plasma sample” refers to the fluid, non-cellular portion of the blood.

[0057] As used herein, a “polypeptide sample” refers to a sample containing two or more different polypeptides. A polypeptide sample can include tens, hundreds, or even thousands or more different polypeptides. A polypeptide sample can also include non-protein molecules so long as the sample contains polypeptides. A polypeptide sample can be a whole cell or tissue extract or can be a biological fluid. Furthermore, a polypeptide sample can be fractionated using well known methods, as disclosed herein, into partially or substantially purified protein fractions. In a particular embodiment, a polypeptide sample can be a serum sample or plasma sample.

[0058] The use of biological fluids such as a body fluid as a sample source is particularly useful in methods of the invention. Biological fluid specimens are generally readily accessible and available in relatively large quantities for clinical analysis. Biological fluids can be used to analyze diagnostic and prognostic markers for various diseases. In addition to ready accessibility, body fluid specimens do not require any prior knowledge of the specific organ or the specific site in an organ that might be affected by disease. Because body fluids, in particular blood, are in contact with numerous body organs, body fluids “pick up” molecular signatures indicating pathology due to secretion or cell lysis associated with a pathological condition. Body fluids also pick up molecular signatures that are suitable for evaluating drug dosage, drug targets and/or toxic effects, as disclosed herein. The invention can advantageously be used with readily accessible samples such as blood, plasma or serum.

[0059] The methods of the invention utilize the selective isolation of glycopolypeptides coupled with chemical modification to facilitate MS analysis. Proteins are glycosylated by complex enzymatic mechanisms, typically at the side chains of serine or threonine residues (O-linked) or the side chains of asparagine residues (N-linked). N-linked glycosylation sites generally fall into a sequence motif that can be described as N-X-S/T, where X can be any amino acid except proline. Glycosylation plays an important function in many biological processes (reviewed in Helenius and Aebi, Science 291:2364-2369 (2001); Rudd et al., Science 291:2370-2375 (2001)).

[0060] Protein glycosylation has long been recognized as a very common post-translational modification. As discussed above, carbohydrates are linked to serine or threonine residues (O-linked glycosylation) or to asparagine residues (N-linked glycosylation) (Varki et al. Essentials of Glycobiology Cold Spring Harbor Laboratory (1999)). Protein glycosylation, and in particular N-linked glycosylation, is prevalent in proteins destined for extracellular environments (Roth, Chem. Rev. 102:285-303 (2002)). These include proteins on the extracellular side of the plasma membrane, secreted proteins, and proteins contained in body fluids, for example, blood serum, cerebrospinal fluid, urine, breast milk, saliva, lung lavage fluid, pancreatic juice, and the like. These also happen to be the proteins in the human body that are most easily accessible for diagnostic and therapeutic purposes.

[0061] Due to the ready accessibility of body fluids exposed to the extracellular surface of cells and the presence of secreted proteins in these fluids, many clinical biomarkers and therapeutic targets are glycoproteins. These include Her2/neu in breast cancer, human chorionic gonadotropin and α-fetoprotein in germ cell tumors, prostate-specific antigen in prostate cancer, and CA125 in ovarian cancer. The Her2/neu receptor is also the target for a successful immunotherapy of breast cancer using the humanized monoclonal antibody Herceptin (Shepard et al., J. Clin. Immunol. 11:117-127 (1991)). In addition, changes in the extent of glycosylation and the carbohydrate structure of proteins on the cell surface and in body fluids have been shown to correlate with cancer and other disease states, highlighting the clinical importance of this modification as an indicator or effector of pathologic mechanisms (Durand and Seta, Clin. Chem. 46:795-805 (2000); Freeze, Glycobiology 11:129R-143R (2001); Spiro, Glycobiology 12:43R-56R (2002)). Therefore, a method for the systematic and quantitative analysis of glycoproteins would be of significance for the detection of new potential diagnostic markers and therapeutic targets.

[0062] To selectively isolate glycopolypeptides, the methods utilize chemistry and/or binding interactions that are specific for carbohydrate moieties. Selective binding of glycopolypeptides refers to the preferential binding of glycopolypeptides over non-glycosylated peptides. The methods of the invention can utilize covalent coupling of glycopolypeptides, which is particularly useful for increasing the selective isolation of glycopolypeptides by allowing stringent washing to remove non-specifically bound, non-glycosylated polypeptides.

[0063] The carbohydrate moieties of a glycopolypeptide are chemically or enzymatically modified to generate a reactive group that can be selectively bound to a solid support having a corresponding reactive group. In the embodiment depicted in FIG. 1, the carbohydrates of glycopolypeptides are oxidized to aldehydes. The oxidation can be performed, for example, with sodium periodate. The hydroxyl groups of a carbohydrate can also be derivatized by epoxides or oxiranes, alkyl halogen, carbonyldiimidazoles, N,N′-disuccinimidyl carbonates, N-hydroxycuccinimidyl chloroformates, and the like. The hydroxyl groups of a carbohydrate can also be oxidized by enzymes to create reactive groups such as aldehyde groups. For example, galactose oxidase oxidizes terminal galactose or N-acetyl-D-galactose residues to form C-6 aldehyde groups. These derivatized groups can be conjugated to amine- or hydrazide- containing moieties.

[0064] The oxidation of hydroxyl groups to aldehyde using sodium periodate is specific for the carbohydrate of a glycopeptide. Sodium periodate can oxidize hydroxyl groups on adjacent carbon atoms, forming aldehydes for coupling with amine- or hydrazide-containing molecules. Sodium periodate also reacts with hydroxylamine derivatives, compounds containing a primary amine and a secondary hydroxyl group on adjacent carbon atoms. This reaction is used to create reactive aldehydes on N-terminal serine residues of peptides. A serine residue is rare at the N-terminus of a protein. The oxidation to an aldehyde using sodium periodate is therefore specific for the carbohydrate groups of a glycopolypeptide.

[0065] Once the carbohydrate of a glycopolypeptide is modified, for example, by oxidition to aldehydes, the modified carbohydrates can bind to a solid support containing hydrazide or amine moieties, such as the hydrazide resin depicted in FIG. 1. Although illustrated with oxidation chemistry and coupling to hydrazide, it is understood that any suitable chemical modifications and/or binding interactions that allows specific binding of the carbohydrate moieties of a glycopolypeptide can be used in methods of the invention. The binding interactions of the glycopolypeptides with the solid support are generally covalent, although non-covalent interactions can also be used so long as the glycopolypeptides or glycopeptide fragments remain bound during the digestion, washing and other steps of the methods.

[0066] The methods of the invention can also be used to select and characterize subgroups of carbohydrates. Chemical modifications or enzymatic modifications using, for example, glycosidases can be used to isolate subgroups of carbohydrates. For example, the concentration of sodium periodate can be modulated so that oxidation occurs on sialic acid groups of glycoproteins. In particular, a concentration of about 1 mM of sodium periodate at 0° C. can be used to modify sialic acid groups.

[0067] Glycopolypeptides containing specific monosaccharides can be targeted using a selective sugar oxidase to generate aldehyde functions, such as the galactose oxidase described above or other sugar oxidases. Furthermore, glycopolypeptides containing a subgroup of carbohydrates can be selected after the glycopolypeptides are bound to a solid support. For example, glycopeptides bound to a solid support can be selectively released using different glycosidases having specificity for particular monosaccharide structures.

[0068] The glycopolypeptides are isolated by binding to a solid support. The solid support can be, for example, a bead, resin, membrane or disk, or any solid support material suitable for methods of the invention. An advantage of using a solid support to bind the glycopolypeptides is that it allows extensive washing to remove non-glycosylated polypeptides. Thus, in the case of complex samples containing a multitude of polypeptides, the analysis can be simplified by isolating glycopolypeptides and removing the non-glycosylated polypeptides, thus reducing the number of polypeptides to be analyzed.

[0069] The glycopolypeptides can also be conjugated to an affinity tag through an amine group, such as biotin hydrazide. The glycopeptides can be cleaved by a protease. The affinity tagged glycopeptides can then be immobilized to the solid support, for example, an avidin or streptavidin solid support, and the non-glycosylated peptides are removed. The tagged glycopeptides can be released from the solid support by enzymatic or chemical cleavage. Alternatively, the tagged glycopeptides can be released from the solid support with the oligosaccharide and affinity tag attached.

[0070] Another advantage of binding the glycopolypeptides to the solid support is that it allows further manipulation of the sample molecules without the need for additional purification steps that can result in loss of sample molecules. For example, the methods of the invention can involve the steps of cleaving the bound glycopolypeptides as well as adding an isotope tag, or other desired modifications of the bound glycopolypeptides. Because the glycopolypeptides are bound, these steps can be carried out on solid phase while allowing excess reagents to be removed as well as extensive washing prior to subsequent manipulations.

[0071] The bound glycopolypeptides can be cleaved into peptide fragments to facilitate MS analysis. Thus, a polypeptide molecule can be enzymatically cleaved with one or more proteases into peptide fragments. Exemplary proteases useful for cleaving polypeptides include trypsin, chymotrypsin, pepsin, papain, Staphylococcus aureus (V8) protease, Submaxillaris protease, bromelain, thermolysin, and the like. In certain applications, proteases having cleavage specificities that cleave at fewer sites, such as sequence-specific proteases having specificity for a sequence rather than a single amino acid, can also be used, if desired. Polypeptides can also be cleaved chemically, for example, using CNBr, acid or other chemical reagents. A particularly useful cleavage reagent is the protease trypsin. One skilled in the art can readily determine appropriate conditions for cleavage to achieve a desired efficiency of peptide cleavage.

[0072] Cleavage of the bound glycopolypeptides is particularly useful for MS analysis in that one or a few peptides are generally sufficient to identify a parent polypeptide. However, it is understood that cleavage of the bound glycopolypeptides is not required, in particular where the bound glycopolypeptide is relatively small and contains a single glycosylation site. Furthermore, the cleavage reaction can be carried out after binding of glycopolypeptides to the solid support, allowing characterization of non-glycosylated peptide fragments derived from the bound glycopolypeptide. Alternatively, the cleavage reaction can be carried out prior to addition of the glycopeptides to the solid support. One skilled in the art can readily determine the desirability of cleaving the sample polypeptides and an appropriate point to perform the cleavage reaction, as needed for a particular application of the methods of the invention.

[0073] If desired, the bound glycopolypeptides can be denatured and optionally reduced. Denaturing and/or reducing the bound glycopolypeptides can be useful prior to cleavage of the glycopolypeptides, in particular protease cleavage, because this allows access to protease cleavage sites that can be masked in the native form of the glycopolypeptides. The bound glycopeptides can be denatured with detergents and/or chaotropic agents. Reducing agents such as β-mercaptoethanol, dithiothreitol, tris-carboxyethylphosphine (TCEP), and the like, can also be used, if desired. As discussed above, the binding of the glycopolypeptides to a solid support allows the denaturation step to be carried out followed by extensive washing to remove denaturants that could inhibit the enzymatic or chemical cleavage reactions. The use of denaturants and/or reducing agents can also be used to dissociate protein complexes in which non-glycosylated proteins form complexes with bound glycopolypeptides. Thus, the use of these agents can be used to increase the specificity for glycopolypeptides by washing away non-glycosylated polypeptides from the solid support.

[0074] Treatment of the bound glycopolypeptides with a cleavage reagent results in the generation of peptide fragments. Because the carbohydrate moiety is bound to the solid support, those peptide fragments that contain the glycosylated residue remain bound to the solid support. Following cleavage of the bound glycopolypeptides, glycopeptide fragments remain bound to the solid support via binding of the carbohydrate moiety. Peptide fragments that are not glycosylated are released from the solid support. If desired, the released non-glycosylated peptides can be analyzed, as described in more detail below.

[0075] The methods of the invention can be used to identify and/or quantify the amount of a glycopolypeptide present in a sample. A particularly useful method for identifying and quantifying a glycopolypeptide is mass spectrometry (MS). The methods of the invention can be used to identify a glycopolypeptide qualitatively, for example, using MS analysis. If desired, an isotope tag can be added to the bound glycopeptide fragments, in particular to facilitate quantitative analysis by MS.

[0076] As used herein an “isotope tag” refers to a chemical moiety having suitable chemical properties for incorporation of an isotope, allowing the generation of chemically identical reagents of different mass which can be used to differentially tag a polypeptide in two samples. The isotope tag also has an appropriate composition to allow incorporation of a stable isotope at one or more atoms. A particularly useful stable isotope pair is hydrogen and deuterium, which can be readily distinguished using mass spectrometry as light and heavy forms, respectively. Any of a number of isotopic atoms can be incorporated into the isotope tag so long as the heavy and light forms can be distinguished using mass spectrometry, for example, ¹³C, ¹⁵N, ¹⁷O, ¹⁸O or ³⁴S. Exemplary isotope tags include the 4,7,10-trioxa-1,13-tridecanediamine based linker and its related deuterated form, 2,2′,3,3′,11,11′,12,12′-octadeutero-4,7,10-trioxa-1,13-tridecanediamine, described by Gygi et al. (Nature Biotechnol. 17:994-999 (1999). Other exemplary isotope tags have also been described previously (see WO 00/11208, which is incorporated herein by reference).

[0077] In contrast to these previously described isotope tags related to an ICAT-type reagent, it is not required that an affinity tag be included in the reagent since the glycopolypeptides are already isolated. One skilled in the art can readily determine any of a number of appropriate isotope tags useful in methods of the invention. An isotope tag can be an alkyl, akenyl, alkynyl, alkoxy, aryl, and the like, and can be optionally substituted, for example, with O, S, N, and the like, and can contain an amine, carboxyl, sulfhydryl, and the like (see WO 00/11208). Exemplary isotope tags include succinic anhydride, isatoic-anhydride, N-methyl-isatoic-anhydride, glyceraldehyde, Boc-Phe-OH, benzaldehyde, salicylaldehyde, and the like (FIG. 2). In addition to Phe, as shown in FIGS. 2 and 3, other amino acids similarly can be used as isotope tags. Furthermore, small organic aldehydes, similar to those shown in FIG. 2, can be used as isotope tags. These and other derivatives can be made in the same manner as that disclosed herein using methods well known to those skilled in the art. One skilled in the art will readily recognize that a number of suitable chemical groups can be used as an isotope tag so long as the isotope tag can be differentially isotopically labeled.

[0078] The bound glycopeptide fragments are tagged with an isotope tag to facilitate MS analysis. In order to tag the glycopeptide fragments, the isotope tag contains a reactive group that can react with a chemical group on the peptide portion of the glycopeptide fragments. A reactive group is reactive with and therefore can be covalently coupled to a molecule in a sample such as a polypeptide. Reactive groups are well known to those skilled in the art (see, for example, Hermanson, Bioconjugate Techniques, pp. 3-166, Academic Press, San Diego (1996); Glazer et al., Laboratory Techniques in Biochemistry and Molecular Biology: Chemical Modification of Proteins, Chapter 3, pp. 68-120, Elsevier Biomedical Press, New York (1975); Pierce Catalog (1994), Pierce, Rockford Ill.). Any of a variety of reactive groups can be incorporated into an isotope tag for use in methods of the invention so long as the reactive group can be covalently coupled to the immobilized polypeptide.

[0079] To analyze a large number or essentially all of the bound glycopolypeptides, it is desirable to use an isotope tag having a reactive group that will react with the majority of the glycopeptide fragments. For example, a reactive group that reacts with an amino group can react with the free amino group at the N-terminus of the bound glycopeptide fragments. If a cleavage reagent is chosen that leaves a free amino group of the cleaved peptides, such an amino group reactive agent can label a large fraction of the peptide fragments. Only those with a blocked N-terminus would not be labeled. Similarly, a cleavage reagent that leaves a free carboxyl group on the cleaved peptides can be modified with a carboxyl reactive group, resulting in the labeling of many if not all of the peptides. Thus, the inclusion of amino or carboxyl reactive groups in an isotope tag is particularly useful for methods of the invention in which most if not all of the bound glycopeptide fragments are desired to be analyzed.

[0080] In addition, a polypeptide can be tagged with an isotope tag via a sulfhydryl reactive group, which can react with free sulfhydryls of cysteine or reduced cystines in a polypeptide. An exemplary sulfhydryl reactive group includes an iodoacetamido group (see Gygi et al., supra, 1999). Other examplary sulfhydryl reactive groups include maleimides, alkyl and aryl halides, haloacetyls, α-haloacyls, pyridyl disulfides, aziridines, acrylolyls, arylating agents and thiomethylsulfones.

[0081] In addition, a synthetic standard polypeptide can be tagged during the peptide synthesis process using heavy isotopic labeled residues as substitution. The heavy isotope labeled residues can be any amino acids present in the peptide sequence, such as heavy isotope tagged Leu, Val, Pro, Phe, and Asp (Underlined residues in Table 5 for synthesized stable isotope tagged standard peptides). Since the N-linked Asn residues are converted to Asp during the glycopeptide capture-and-release procedure. Asp instead of Asn was incorporated into peptide sequence in peptide synthesis of the stable isotope labeled peptides.

[0082] A reactive group can also react with amines such as the α-amino group of a peptide or the ε-amino group of the side chain of Lys, for example, imidoesters, N-hydroxysuccinimidyl esters (NHS), isothiocyanates, isocyanates, acyl azides, sulfonyl chlorides, aldehydes, ketones, glyoxals, epoxides (oxiranes), carbonates, arylating agents, carbodiimides, anhydrides, and the like. A reactive group can also react with carboxyl groups found in Asp or Glu or the C-terminus of a peptide, for example, diazoalkanes, diazoacetyls, carbonyldiimidazole, carbodiimides, and the like. A reactive group that reacts with a hydroxyl group includes, for example, epoxides, oxiranes, carbonyldiimidazoles, N,N′-disuccinimidyl carbonates, N-hydroxycuccinimidyl chloroformates, and the like. A reactive group can also react with amino acids such as histidine, for example, α-haloacids and amides; tyrosine, for example, nitration and iodination; arginine, for example, butanedione, phenylglyoxal, and nitromalondialdehyde; methionine, for example, iodoacetic acid and iodoacetamide; and tryptophan, for example, 2-(2-nitrophenylsulfenyl)-3-methyl-3-bromoindolenine (BNPS-skatole), N-bromosuccinimide, formylation, and sulfenylation (Glazer et al., supra, 1975). In addition, a reactive group can also react with a phosphate group for selective labeling of phosphopeptides (Zhou et al., Nat. Biotechnol., 19:375-378 (2001)) or with other covalently modified peptides, including lipopeptides, or any of the known covalent polypeptide modifications. One skilled in the art can readily determine conditions for modifying sample molecules by using various reagents, incubation conditions and time of incubation to obtain conditions suitable for modification of a molecule with an isotope tag. The use of covalent-chemistry based isolation methods is particularly useful due to the highly specific nature of the binding of the glycopolypeptides.

[0083] The reactive groups described above can form a covalent bond with the target sample molecule. However, it is understood that an isotope tag can contain a reactive group that can non-covalently interact with a sample molecule so long as the interaction has high specificity and affinity.

[0084] Prior to further analysis, it is generally desirable to release the bound glycopeptide fragments. The glycopeptide fragments can be released by cleaving the fragments from the solid support, either enzymatically or chemically. For example, glycosidases such as N-glycosidases and O-glycosidases can be used to cleave an N-linked or O-linked carbohydrate moiety, respectively, and release the corresponding de-glycosylated peptide(s). If desired, N-glycosidases and O-glycosidases can be added together or sequentially, in either order. The sequential addition of an N-glycosidase and an O-glycosidase allows differential characterization of those released peptides that were N-linked versus those that were O-linked, providing additional information on the nature of the carbohydrate moiety and the modified amino acid residue. Thus, N-linked and O-linked glycosylation sites can be analyzed sequentially and separately on the same sample, increasing the information content of the experiment and simplifying the complexity of the samples being analyzed.

[0085] In addition to N-glycosidases and O-glycosidases, other glycosidases can be used to release a bound glycopolypeptide. For example, exoglycosidases can be used. Exoglycosidases are anomeric, residue and linkage specific for terminal monnosaccharides and can be used to release peptides having the corresponding carbohydrate.

[0086] In addition to enzymatic cleavage, chemical cleavage can also be used to cleave a carbohydrate moiety to release a bound peptide. For example, O-linked oligosaccharides can be released specifically from a polypeptide via a β-elimination reaction catalyzed by alkali. The reaction can be carried out in about 50 mM NaOH containing about 1 M NaBH₄ at about 55° C. for about 12 hours. The time, temperature and concentration of the reagents can be varied so long as a sufficient ÿ-elimination reaction is carried out for the needs of the experiment.

[0087] In one embodiment, N-linked oligosaccharides can be released from glycopolypeptides, for example, by hydrazinolysis. Glycopolypeptides can be dried in a desiccator over P₂O₅ and NaOH. Anhydrous hydrazine is added and heated at about 100° C. for 10 hours, for example, using a dry heat block.

[0088] In addition to using enzymatic or chemical cleavage to release a bound glycopeptide, the solid support can be designed so that bound molecules can be released, regardless of the nature of the bound carbohydrate. The reactive group on the solid support, to which the glycopolypeptide binds, can be linked to the solid support with a cleavable linker. For example, the solid support reactive group can be covalently bound to the solid support via a cleavable linker such as a photocleavable linker. Exemplary photocleavable linkers include, for example, linkers containing o-nitrobenzyl, desyl, trans-o-cinnamoyl, m-nitrophenyl, benzylsulfonyl groups (see, for example, Dorman and Prestwich, Trends Biotech. 18:64-77 (2000); Greene and Wuts, Protective Groups in Organic Synthesis, 2nd ed., John Wiley & Sons, New York (1991); U.S. Pat. Nos. 5,143,854; 5,986,076; 5,917,016; 5,489,678; 5,405,783). Similarly, the reactive group can be linked to the solid support via a chemically cleavable linker. Release of glycopeptide fragments with the intact carbohydrate is particularly useful if the carbohydrate moiety is to be characterized using well known methods, including mass spectrometry. The use of glycosidases to release de-glycosylated peptide fragments also provides information on the nature of the carbohydrate moiety.

[0089] Glycopolypeptides from a sample are bound to a solid support via the carbohydrate moiety. The bound glycopolypeptides are generally cleaved, for example, using a protease, to generate glycopeptide fragments. As discussed above, a variety of methods can be used to release the bound glycopeptide fragments, thereby generating released glycopeptide fragments. As used herein, a “released glycopeptide fragment” refers to a peptide which was bound to a solid support via a covalently bound carbohydrate moiety and subsequently released from the solid support, regardless of whether the released peptide retains the carbohydrate. In some cases, the method by which the bound glycopeptide fragments are released results in cleavage and removal of the carbohydrate moiety, for example, using glycosidases or chemical cleavage of the carbohydrate moiety. If the solid support is designed so that the reactive group, for example, hydrazide, is attached to the solid support via a cleavable linker, the released glycopeptide fragment retains the carbohydrate moiety. It is understood that, regardless whether a carbohydrate moiety is retained or removed from the released peptide, such peptides are referred to as released glycopeptide fragments.

[0090] After isolating glycopolypeptides from a sample and cleaving the glycopolypeptide into fragments, the glycopeptide fragments released from the solid support and the released glycopeptide fragments are identified and/or quantitified. A particularly useful method for analysis of the released glycopeptide fragments is mass spectrometry. A variety of mass spectrometry systems can be employed in the methods of the invention for identifying and/or quantifying a sample molecule such as a released glycopolypeptide fragment. Mass analyzers with high mass accuracy, high sensitivity and high resolution include, but are not limited to, ion trap, triple quadrupole, and time-of-flight, quadrupole time-of-flight mass spectrometers and Fourier transform ion cyclotron mass analyzers (FT-ICR-MS). Mass spectrometers are typically equipped with matrix-assisted laser desorption (MALDI) or electrospray ionization (ESI) ion sources, although other methods of peptide ionization can also be used. In ion trap MS, analytes are ionized by ESI or MALDI and then put into an ion trap. Trapped ions can then be separately analyzed by MS upon selective release from the ion trap. Fragments can also be generated in the ion trap and analyzed. Sample molecules such as released glycopeptide fragments can be analyzed, for example, by single stage mass spectrometry with a MALDI-TOF or ESI-TOF system. Methods of mass spectrometry analysis are well known to those skilled in the art (see, for example, Yates, J. Mass Spect. 33:1-19 (1998); Kinter and Sherman, Protein Sequencing and Identification Using Tandem Mass Spectrometry, John Wiley & Sons, New York (2000); Aebersold and Goodlett, Chem. Rev. 101:269-295 (2001)).

[0091] For high resolution polypeptide fragment separation, liquid chromatography ESI-MS/MS or automated LC-MS/MS, which utilizes capillary reverse phase chromatography as the separation method, can be used (Yates et al., Methods Mol. Biol. 112:553-569 (1999)). Data dependent collision-induced dissociation (CID) with dynamic exclusion can also be used as the mass spectrometric method (Goodlett, et al., Anal. Chem. 72:1112-1118 (2000)).

[0092] Once a peptide is analyzed by MS/MS, the resulting CID spectrum can be compared to databases for the determination of the identity of the isolated glycopeptide. Methods for protein identification using single peptides has been described previously (Aebersold and Goodlett, Chem. Rev. 101:269-295 (2001); Yates, J. Mass Spec. 33:1-19 (1998)). In particular, it is possible that one or a few peptide fragments can be used to identify a parent polypeptide from which the fragments were derived if the peptides provide a unique signature for the parent polypeptide. Thus, identification of a single glycopeptide, alone or in combination with knowledge of the site of glycosylation, can be used to identify a parent glycopolypeptide from which the glycopeptide fragments were derived. Further information can be obtained by analyzing the nature of the attached tag and the presence of the consensus sequence motif for carbohydrate attachment. For example, if peptides are modified with an N-terminal tag, each released glycopeptide has the specific N-terminal tag, which can be recognized in the fragment ion series of the CID spectra. Furthermore, the presence of a known sequence motif that is found, for example, in N-linked carbohydrate-containing peptides, that is, the consensus sequence NXS/T, can be used as a constraint in database searching of N-glycosylated peptides.

[0093] In addition, the identity of the parent glycopolypeptide can be determined by analysis of various characteristics associated with the peptide, for example, its resolution on various chromatographic media or using various fractionation methods. These empirically determined characteristics can be compared to a database of characteristics that uniquely identify a parent polypeptide, which defines a peptide tag.

[0094] The use of a peptide tag and related database is used for identifying a polypeptide from a population of polypeptides by determining characteristics associated with a polypeptide, or a peptide fragment thereof, comparing the determined characteristics to a polypeptide identification index, and identifying one or more polypeptides in the polypeptide identification index having the same characteristics (see WO 02/052259). The methods are based on generating a polypeptide identification index, which is a database of characteristics associated with a polypeptide. The polypeptide identification index can be used for comparison of characteristics determined to be associated with a polypeptide from a sample for identification of the polypeptide. Furthermore, the methods can be applied not only to identify a polypeptide but also to quantitate the amount of specific proteins in the sample.

[0095] The incorporation of an isotope tag can be used to facilitate quantification of the sample glycopolypeptides. As disclosed previously, the incorporation of an isotope tag provides a method for quantifying the amount of a particular molecule in a sample (Gygi et al., supra, 1999; WO 00/11208). In using an isotope tag, differential isotopes can be incorporated, which can be used to compare a known amount of a standard labeled molecule having a differentially labeled isotope tag from that of a sample molecule, as described in more detail below. Thus, a standard peptide having a differential isotope can be added at a known concentration and analyzed in the same MS analysis or similar conditions in a parallel MS analysis. A specific, calibrated standard can be added with known absolute amounts to determine an absolute quantity of the glycopolypeptide in the sample. In addition, the standards can be added so that relative quantitation is performed, as described below.

[0096] Alternatively, parallel glycosylated sample molecules can be labeled with a different isotopic label and compared side-by-side (see Gygi et al., supra, 1999). This is particularly useful for qualitative analysis or quantitative analysis relative to a control sample. For example, a glycosylated sample derived from a disease state can be compared to a glycosylated sample from a non-disease state by differentially labeling the two samples, as described previously (Gygi et al., supra, 1999). Such an approach allows detection of differential states of glycosylation, which is facilitated by the use of differential isotope tags for the two samples, and can thus be used to correlate differences in glycosylation as a diagnostic marker for a disease.

[0097] The methods of the invention provide numerous advantages for the analysis of complex biological and clinical samples. From every glycoprotein present in a complex sample, only a few peptides will be isolated since only a few peptides of a glycoprotein are glycosylated. Therefore, by isolating glycopeptide fragments, the composition of the resulting peptide mixture is significantly simplified for mass spectrometric analysis. For example, every protein on average will produce dozens of tryptic peptides but only one to a few tryptic glycosylated peptides. For example, the number of glycopeptides is significantly lower than the number of tryptic peptides or Cys-containing peptides in the major plasma proteins. Thus, analysis of glycopolypeptides or glycopeptides reduces the complexity of complex biological samples, for example, serum.

[0098] Another advantage of the methods of the invention is the use for analysis of body fluids as a clinical specimen, in particular serum. Five major plasma proteins represent more than 80% of the total protein in plasma, albumin, α1 antitrypsin, α2 macroglobulin, transferrin, and γ-globulins. Of these, albumin is the most abundant protein in blood serum and other body fluids, constituting about 50% of the total protein in plasma. However, albumin is essentially transparent to the methods of the invention due to the lack of N-glycosylation. For example, no tryptic N-glycosylated peptides from albumin were observed when the methods of the invention were applied and a N-glycosidase was used to release the N-linked glycopeptides. This is all the more significant because more than 50 different albumin species have been detected by 2D gel electrophoresis that collectively obscure a significant part of the gel pattern and the analysis of less abundant serum proteins having clinical significance. Therefore, the methods of the invention that allow analysis of glycosylated proteins compensate for the dominance of albumin in serum and allow the analysis of less abundant, glycosylated proteins present in serum. As disclosed herein, the methods of the invention allowed the identification of many more serum proteins compared to conventional methods. The methods of the invention also allow the analysis of less abundant serum proteins. These low abundance serum proteins are potential diagnostic markers. Such markers can be readily determined by comparing disease samples with healthy samples, as disclosed herein.

[0099] Additionally, the known sequence motif for N-glycosylation (N-X-S/T) serves as a powerful sequence database search constraint for the identification of the isolated peptides. This can be used to facilitate the identification of the polypeptide from which the glycopeptide fragment was derived since a smaller number of possible peptides will contain the glycosylation motif.

[0100] The methods of the invention are also advantageous because they allow fast throughput and simplicity. Accordingly, the methods can be readily adapted for high throughput analysis of samples, which can be particularly advantageous for the analysis of clinical samples. Furthermore, the methods of the invention can be automated to facilitate the processing of multiple samples. As disclosed herein, a robotic workstation has been adapted for automated glycoprotein analysis.

[0101] As described above, non-glycosylated peptide fragments are released from the solid support after proteolytic or chemical cleavage. If desired, the released peptide fragments can be characterized to provide further information on the nature of the glycopolypeptides isolated from the sample. A particularly useful method is the use of the isotope-coded affinity tag (ICAT™) method (Gygi et al., Nature Biotechnol. 17:994-999 (1999) which is incorporated herein by reference). The ICAT™ type reagent method uses an affinity tag that can be differentially labeled with an isotope that is readily distinguished using mass spectrometry. The ICAT™ type affinity reagent consists of three elements, an affinity tag, a linker and a reactive group.

[0102] One element of the ICAT™ type affinity reagent is an affinity tag that allows isolation of peptides coupled to the affinity reagent by binding to a cognate binding partner of the affinity tag. A particularly useful affinity tag is biotin, which binds with high affinity to its cognate binding partner avidin, or related molecules such as streptavidin, and is therefore stable to further biochemical manipulations. Any affinity tag can be used so long as it provides sufficient binding affinity to its cognate binding partner to allow isolation of peptides coupled to the ICAT™ type affinity reagent. An affinity tag can also be used to isolate a tagged peptide with magnetic beads or other magnetic format suitable to isolate a magnetic affinity tag. In the ICAT™ type reagent method, or any other method of affinity tagging a peptide, the use of covalent trapping, for example, using a cross-linking reagent, can be used to bind the tagged peptides to a solid support, if desired.

[0103] A second element of the ICAT™ type affinity reagent is a linker that can incorporate a stable isotope. The linker has a sufficient length to allow the reactive group to bind to a specimen polypeptide and the affinity tag to bind to its cognate binding partner. The linker also has an appropriate composition to allow incorporation of a stable isotope at one or more atoms. A particularly useful stable isotope pair is hydrogen and deuterium, which can be readily distinguished using mass spectrometry as light and heavy forms, respectively. Any of a number of isotopic atoms can be incorporated into the linker so long as the heavy and light forms can be distinguished using mass spectrometry. Exemplary linkers include the 4,7,10-trioxa-1,13-tridecanediamine based linker and its related deuterated form, 2,2′,3,3′,11,11′,12,12′-octadeutero-4,7,10-trioxa-1,13-tridecanediamine, described by Gygi et al. (supra, 1999). One skilled in the art can readily determine any of a number of appropriate linkers useful in an ICAT™ type affinity reagent that satisfy the above-described criteria, as described above for the isotope tag.

[0104] The third element of the ICAT™ type affinity reagent is a reactive group, which can be covalently coupled to a polypeptide in a specimen. Various reactive groups have been described above with respect to the isotope tag and can similarly be incorporated into an ICAT-type reagent.

[0105] The ICAT™ method or other similar methods can be applied to the analysis of the non-glycosylated peptide fragments released from the solid support. Alternatively, the ICAT™ method or other similar methods can be applied prior to cleavage of the bound glycopolypeptides, that is, while the intact glycopolypeptide is still bound to the solid support.

[0106] The method generally involves the steps of automated tandem mass spectrometry and sequence database searching for peptide/protein identification; stable isotope tagging for quantification by mass spectrometry based on stable isotope dilution theory; and the use of specific chemical reactions for the selective isolation of specific peptides. For example, the previously described ICAT™ reagent contained a sulfhydryl reactive group, and therefore an ICAT™ -type reagent can be used to label cysteine-containing peptide fragments released from the solid support. Other reactive groups, as described above, can also be used.

[0107] The analysis of the non-glycosylated peptides, in conjunction with the methods of analyzing glycosylated peptides, provides additional information on the state of polypeptide expression in the sample. By analyzing both the glycopeptide fragments as well as the non-glycosylated peptides, changes in glycoprotein abundance as well as changes in the state of glycosylation at a particular glycosylation site can be readily determined.

[0108] If desired, the sample can be fractionated by a number of known fractionation techniques. Fractionation techniques can be applied at any of a number of suitable points in the methods of the invention. For example, a sample can be fractionated prior to oxidation and/or binding of glycopolypeptides to a solid support. Thus, if desired, a substantially purified fraction of glycopolypeptide(s) can be used for immobilization of sample glycopolypeptides. Furthermore, fractionation/purification steps can be applied to non-glycosylated peptides or glycopeptides after release from the solid support. One skilled in the art can readily determine appropriate steps for fractionating sample molecules based on the needs of the particular application of methods of the invention. In the case of a blood sample, one skilled in the art can readily use well known methods for processing the blood, for example, to obtain plasma or serum.

[0109] Methods for fractionating sample molecules are well known to those skilled in the art. Fractionation methods include but are not limited to subcellular fractionation or chromatographic techniques such as ion exchange, including strong and weak anion and cation exchange resins, hydrophobic and reverse phase, size exclusion, affinity, hydrophobic charge-induction chromatography, dye-binding, and the like (Ausubel et al., Current Protocols in Molecular Biology (Supplement 56), John Wiley & Sons, New York (2001); Scopes, Protein Purification: Principles and Practice, third edition, Springer-Verlag, New York (1993)). Other fractionation methods include, for example, centrifugation, electrophoresis, the use of salts, and the like (see Scopes, supra, 1993). In the case of analyzing membrane glycoproteins, well known solubilization conditions can be applied to extract membrane bound proteins, for example, the use of denaturing and/or non-denaturing detergents (Scopes, supra, 1993).

[0110] Affinity chromatography can also be used including, for example, dye-binding resins such as Cibacron blue, substrate analogs, including analogs of cofactors such as ATP, NAD, and the like, ligands, specific antibodies useful for immuno-affinity isolation, either polyclonal or monoclonal, and the like. A subset of glycopolypeptides can be isolated using lectin affinity chromatography, if desired. An exemplary affinity resin includes affinity resins that bind to specific moieties that can be incorporated into a polypeptide such as an avidin resin that binds to a biotin tag on a sample molecule labeled with an ICAT™-type reagent. The resolution and capacity of particular chromatographic media are known in the art and can be determined by those skilled in the art. The usefulness of a particular chromatographic separation for a particular application can similarly be assessed by those skilled in the art.

[0111] Those of skill in the art will be able to determine the appropriate chromatography conditions for a particular sample size or composition and will know how to obtain reproducible results for chromatographic separations under defined buffer, column dimension, and flow rate conditions. The fractionation methods can optionally include the use of an internal standard for assessing the reproducibility of a particular chromatographic application or other fractionation method. Appropriate internal standards will vary depending on the chromatographic medium or the fractionation method used. Those skilled in the art will be able to determine an internal standard applicable to a method of fractionation such as chromatography. Furthermore, electrophoresis, including gel electrophoresis or capillary electrophoresis, can also be used to fractionate sample molecules.

[0112] The methods of the invention can be used in a wide range of applications in basic and clinical biology. The methods of the invention can be used for the detection of changes in the profile of proteins expressed in the plasma membrane, changes in the composition of proteins secreted by cells and tissues, changes in the protein composition of body fluids including blood and seminal plasma, cerebrospinal fluid, pancreatic juice, urine, breast milk, lung lavage, and the like. In a particular embodiment, the methods are used to identify and/or quantify glycopolypeptides in a blood, plasma or serum sample, in particular a human sample. Since many of the proteins in these samples are glycosylated, the methods of the invention allow the convenient analysis of glycoproteins in these samples. Detected changes observed in a disease state can be used as diagnostic or prognostic markers for a wide range of diseases, including congenital disorders of glycosylation or any disorder involving aberrant glycosylation; cancer, such as skin, prostate, breast, colon, lung, and others; metabolic diseases or processes such as diabetes or changes in physiological state; inflammatory diseases such as rheumatoid arthritis; mental disorders or neurological processes; infectious disease; immune response to pathogens; and the like. Furthermore, the methods of the invention can be used for the identification of potential targets for a variety of therapies including antibody-dependent cell cytotoxicity directed against cell surface proteins and for detection of proteins accessible to drugs.

[0113] Thus, the methods of the invention can be used to identify diagnostic markers for a disease by comparing a sample from a patient having a disease to a sample from a healthy individual or group of individuals. By comparing disease and healthy samples, a diagnostic pattern can be determined with increases or decreases in expression of particular glycopolypeptides correlated with the disease, which can be used for subsequent analysis of samples for diagnostic purposes. The methods are based on analysis of glycopolypeptides, and such an analysis is sufficient for diagnostic purposes.

[0114] Thus, the invention provides a method for identifying diagnostic glycopolypeptide markers by using a method of the invention and comparing samples from diseased individual(s) to healthy individual(s) and identifying glycopolypeptides having differential expression between the two samples, whereby differences in expression indicates a correlation with the disease and thus can function as a diagnostic marker. The invention also provides the diagnostic markers identified using methods of the invention.

[0115] Furthermore, glycopolypeptides exhibiting differential expression are potential therapeutic targets. Because they are differentially expressed, modulating the activity of these glycopolypeptides can potentially be used to ameliorate a sign or symptom associated with the disease. Thus, the invention provides a method for identifying therapeutic glycopolypeptide targets of a disease. Once a glycopolypeptide is found to be differentially expressed, the potential target can be screened for potential therapeutic agents that modulate the activity of the therapeutic glycopolypeptide target. Methods of generating libraries and screening the libraries for potential therapeutic activity are well known to those skilled in the art. Methods for producing pluralities of compounds, including chemical or biological molecules such as simple or complex organic molecules, metal-containing compounds, carbohydrates, peptides, proteins, peptidomimetics, glycoproteins, lipoproteins, nucleic acids, antibodies, and the like, are well known in the art (see, for example, in Huse, U.S. Pat. No. 5,264,563; Francis et al., Curr. Opin. Chem. Biol. 2:422-428 (1998); Tietze et al., Curr. Biol., 2:363-371 (1998); Sofia, Mol. Divers. 3:75-94 (1998); Eichler et al., Med. Res. Rev. 15:481-496 (1995); Gordon et al., J. Med. Chem. 37: 1233-1251 (1994); Gordon et al., J. Med. Chem. 37: 1385-1401 (1994); Gordon et al., Acc. Chem. Res. 29:144-154 (1996); Wilson and Czamik, eds., Combinatorial Chemistry: Synthesis and Application, John Wiley & Sons, New York (1997)). The invention additionally provides glycopolypeptide therapeutic targets identified by methods of the invention.

[0116] The methods can be used for a variety of clinical and diagnostic applications. Known therapeutic methods effected through glycopolypeptides can be characterized by methods of the invention. For example, therapies such as Enbrel™ and Herceptin function through glycoproteins. The methods of the invention allow characterization of individual patients with respect to glycoprotein expression, which can be used to determine likely efficacy of therapy involving glycoproteins.

[0117] Thus, the methods of the invention can be used in a variety of applications including, but not limited to, the following applications. The methods of the invention can be used, for example, for blood serum profiling for the detection of prognostic and diagnostic protein markers.

[0118] The methods of the invention are applicable in clinical and diagnostic medicine, veterinary medicine, agriculture, and the like. For example, the methods of the invention can be used to identify and/or validate drug targets and to evaluate drug efficacy, drug dosing, and/or drug toxicity. In such a case, the blood proteome, that is serum, can be analyzed using the methods disclosed herein to look for changes in serum glycopolypeptide profiles associated with drug administration and correlated with the effects of drug efficacy, dosing and/or toxicity, and/or validation of drug targets. Such a correlation can be readily determined by collecting serum samples from one or more individuals administered various drug doses, experiencing drug toxicity, experiencing a desired efficacy, and the like. In addition, a plasma or serum profile can be generated in combination with the analysis of drug targets as a way to rapidly and efficiently validate a particular target with the administration of a drug or various drug doses, toxicity, and the like. Thus, serum, plasma or blood samples provide a surrogate marker for the status of an individual and his or her ability to respond to a pharmacological intervention.

[0119] The methods of the invention can additionally be used for quantitative protein profiling in various body fluids in addition to blood plasma, including CSF, pancreatic juice, lung lavage fluid, seminal plasma, urine, breast milk, and the like. The methods of the invention can also be used for quantitative protein profiling of proteins secreted by cells or tissues for the detection of new protein and peptide hormones and other factors. Thus, the invention provides a method to generate quantitative profiles of glycoproteins. The invention also provides a method for quantifying a glycopolypeptide in a sample, as disclosed herein. The invention further provides a method for the detection of prognostic or diagnostic patterns in blood, serum or plasma and other body fluids. The invention additionally provides a method for the detection of secreted protein hormones and regulatory factors. Thus, the invention provides a method for profiling glycopolypeptides from body fluids.

[0120] The methods of the invention are also applicable to the detection of changes in the state of glycosylation of proteins based on the concurrent application of protein abundance measurement and measurement of protein glycosylation on the same sample. Thus, the invention provides a method to detect quantitative changes in the glycosylation pattern of specific proteins.

[0121] Although the methods disclosed herein have generally been described for the analysis of glycopolypeptides, similar methods are also applicable to the analysis of other carbohydrate-containing molecules. Because the methods are based on the specific binding of carbohydrate moieties, the methods of modification and/or isolation can similarly be applied to other carbohydrate-containing molecules. For example, method steps analogous to those disclosed herein can be applied to the identification and quantification of glycosylated molecules such as glycolipids, glycosphingolipids, and the like.

[0122] The invention also provides a composition comprising a plurality of peptides containing the glycosylation sites shown in Tables 7, 8 and/or 10 and referenced as SEQ ID NOS: 1-3482, wherein the peptides each correspond to peptide fragments derived by cleavage of polypeptides using the same cleavage reagent. In one embodiment, the cleavage reagent can be a protease, for example, trypsin.

[0123] The invention additionally provides a kit comprising a plurality of peptides containing the glycosylation sites shown in Tables 7, 8 and/or 10 and referenced as SEQ ID NOS: 1-3482, wherein the peptides each correspond to peptide fragments derived by cleavage of polypeptides using the same cleavage reagent. The kit can further comprise a pair of differentially labeled isotope tags. In addition, the kit can further comprise the cleavage reagent corresponding to the peptide fragments, for example, a protease such as trypsin or other proteases disclosed herein. Additionally, the kit can further comprise a hydrazide resin. Also, a kit of the invention can further comprise a glycosidase.

[0124] The contents of the kit of the invention, for example, any resins or labeling reagents, are contained in suitable packaging material, and, if desired, a sterile, contaminant-free environment. In addition, the packaging material contains instructions indicating how the materials within the kit can be employed to label sample molecules. The instructions for use typically include a tangible expression describing the reagent concentration or at least one assay method parameter, such as the relative amounts of reagent and sample to be admixed, maintenance time periods for reagent/sample admixtures, temperature, buffer conditions, and the like.

[0125] The test sample can be, for example, a specimen from an individual having a disease. The control sample can be, for example, a corresponding specimen obtained from a healthy individual, also referred to herein as a normal sample. The sample can be, for example, serum or a tissue biopsy, as described herein. Differential glycosylation can be a qualitative difference, for example, the presence or absence of a glycopolypeptide in the test sample compared to the control sample. Differential glycosylation can also be a quantitative difference. The determination of quantitative differences can be facilitated by the labeling with differential isotope tags such that the samples can be mixed and compared side-by-side, as disclosed herein and described in Gygi et al., supra, 1999. One or more glycopolypeptides exhibiting differential glycosylation are potential diagnostic markers for the respective disease. Such a method provides a glycopolypeptide disease profile, which can be used subsequently for diagnostic purposes. Accordingly, rather than using one or a few diagnostic markers, the methods of the invention allow the identification of a profile of diagnostic markers, which can provide more detailed information on the type of disease, the stage of disease, and/or the prognosis of a disease by determining profiles correlated with the type, stage and/or prognosis of a disease.

[0126] In yet another embodiment, the invention provides a method of diagnosing a disease. The method can include the steps of immobilizing glycopolypeptides from a test sample to a solid support; cleaving the immobilized glycopolypeptides, thereby releasing non-glycosylated peptides and retaining immobilized glycopeptides; releasing the glycopeptides from the solid support; analyzing the released glycopeptides; and identifying one or more diagnostic markers associated with a disease, for example, as determined by methods of the invention, as described above.

[0127] A test sample from an individual to be tested for a disease or suspected of having a disease can be processed as described for glycopeptide analysis by the methods disclosed herein. The resulting glycopeptide profile from the test sample can be compared to a control sample to determine if changes in glycosylation of diagnostic markers has occurred, as discussed above. Alternatively, the glycopeptide profile can be compared to a known set of diagnostic markers or a database containing information on diagnostic markers.

[0128] In another embodiment, the method of diagnosing a disease can include the step of generating a report on the results of the diagnostic test. For example, the report can indicate whether an individual is likely to have a disease or is likely to be disease free based on the presence of a sufficient number of diagnostic markers associated with a disease. The invention further provides a report of the outcome of a method of diagnosing a disease. Similar reports and preparation of such reports are provided for other methods of the invention.

[0129] It is understood that the methods of the invention can be performed in any order suitable for glycopolypeptide analysis. One skilled in the art can readily determine an appropriate order of carrying out steps of methods of the invention suitable for qualitative and quantitative glycopeptide analysis.

[0130] As disclosed herein, serum proteins contain enormous information about the health of an individual while blood circulates in the body, and proteomic profiling of serum proteins by mass spectrometry can be a powerful approach for biomarker identification and disease detection. Conventional total tryptic peptide analysis of serum proteins is dominated by the appearance of the 22 most abundant proteins, which represent 99% of total plasma content and produce over one thousand peptides. The dominance of the most abundant proteins makes it extremely challenging to access the low abundance proteins and makes it difficult to identify biomarkers among the low abundance proteins.

[0131] Considering that most serum proteins are N-link glycosylated at one or a few tryptic peptides but the most abundant protein, albumin, is not, profiling sera using N-linked glycopeptides and liquid chromatography mass spectrometry (LC-MS) was chosen to achieve high sensitivity and throughput for low abundance serum proteins. As disclosed herein, using this method, over 4000 peptide peaks were detected using sera from normal and carcinogen induced skin cancer mice by two-hour LC-MS analysis (see Example 2). Peptide peaks from LC-MS analysis clearly separated sera of the cancer mice from the normal untreated mice using unsupervised clustering algorithms. The glycopeptides that were elevated in cancer mice were identified using tandem mass spectrometry after isotope labeling the glycopeptides at the amino termini. The combination of glycopeptide capture and LC-MS analysis (glyMS) greatly simplifies the complexity of serum profiling and increases the sensitivity and throughput for low abundance proteins over the total tryptic peptide analysis method.

[0132] Using this method, over 4000 peptide peaks were detected using sera from normal and carcinogen induced skin cancer mice by two-hour LC-MS analysis (see Example 2). Peptide peaks from LC-MS analysis clearly separated sera of the cancer mice from the normal untreated mice using unsupervised clustering algorithms. The glycopeptides that were elevated in cancer mice were identified using tandem mass spectrometry after labeling the glycopeptides with isotope at the amino termini. The combination of glycopeptide capture and LC-MS analysis (glyMS) greatly simplifies the complexity of serum profiling and increases the sensitivity and throughput for low abundance proteins over the total tryptic peptide analysis method.

[0133] It is expected that the composition of the serum proteome can provide valuable information about the state of the human body in health and disease, and that this information can be extracted via quantitative proteomic measurements. Suitable proteomic techniques need to be sensitive, reproducible and robust to detect potential biomarkers below the level of highly expressed proteins, to generate data sets that are comparable between experiments and laboratories, and have high throughput to support statistical studies. Disclosed herein is a method for high throughput quantitative analysis of serum proteins (see Example 2). It consists of the selective isolation of peptides that are N-linked glycosylated in the intact protein, the analysis of these, now de-glycosylated peptides by LC-ESI (electrospray ionization)-MS, and the comparative analysis of the resulting patterns. By focusing selectively on a few formerly N-linked glycopeptides per serum protein, the complexity of the analyte sample is significantly reduced and the sensitivity and throughput of serum proteome analysis are increased compared with the analysis of total tryptic peptides from unfractionated samples. Data are provided that document the performance of the method and show that sera from untreated normal mice and genetically identical mice with carcinogen induced skin cancer can be unambiguously discriminated using unsupervised clustering of the resulting peptide patterns. Some of the peptides that were consistently elevated in cancer mice compared to their control littermates were identified by tandem mass spectrometry.

[0134] There is growing interest in testing the hypothesis that the serum or plasma proteome contains protein biomarkers that are useful for classifying the physiological or pathological status of an individual. Such markers are expected to be useful for the prediction, detection and diagnosis of disease, as well as to follow the efficacy, toxicology and side effects of drug treatment (Wulfkuhle et al., Nat. Rev. Cancer 3:267-275 (2003)). Reading diagnostic or prognostic signatures from human body fluids has been performed. Early attempts using high resolution two dimensional gel electrophoresis (2DE) were described more than 2 decades ago (Anderson and Anderson, Proc. Natl. Acad. Sci. USA 74:5421-5425 (1977); Merril et al., Science 211:1437-1438 (1981); Merril et al., Proc. Natl. Acad. Sci. USA 76:4335-4339 (1979)). Renewed interest in this idea has emerged due to recent advances in proteomic technologies (Aebersold and Mann, Nature 422:198-207 (2003)), intriguing initial results from analyzing serum protein patterns using mass spectrometry (Wulfkuhle et al., Nat. Rev. Cancer 3:267-275 (2003)), and the clinical validation and use of a number of diagnostic disease markers, including CA125 for ovarian cancer, prostate specific antigen (PSA) for prostate cancer and carcinoembryonic antigen (CEA) for colon, breast, pancreatic and lung cancer (Diamandis, Mol. Cell. Proteomics 3:367-378 (2004).

[0135] A number of new approaches that differ from the traditional 2DE method for the discovery of protein biomarkers in serum have recently been described (Wulfkuhle et al., Nat. Rev. Cancer 3:267-275 (2003)). These include surface enhanced laser desorption ionization mass spectrometry (SELDI-MS)(Petricoin et al., Lancet 359:572-577 (2002)), liquid chromatography tandem mass spectrometry (LC-MS/MS) of serum proteome digests (Adkins et al., Mol. Cell. Proteomics 1:947-955 (2002); Tirumalai et al., Mol. Cell. Proteomics 2:1096-1103 (2003); Shen et al., Anal. Chem. 76:1134-1144 (2004), two or three dimensional (chromatography/gel electrophoresis) protein separation analyzed by differential fluorescent staining (Wang and Hanash, J. Chromatogr. B Analyt. Technol. Biomed. Life Sci. 787:11-18 (2003); Shin et al., J. Mammary Gland Biol. Neoplasia 7:407-413 (2002)), fractionation of the serum proteome on surface-modified magnetic beads followed by matrix-assisted laser desorption ionization mass spectrometry (MALDI-MS) (Villanueva et al., Anal. Chem. 76:1560-1570 (2004)), and combinations and variations of these approaches.

[0136] Any study of the serum proteome is confronted with the peculiar properties of serum samples. First, human blood serum is assumed to consist of minimally tens of thousands of different protein species that span a concentration range of an estimated 10 orders of magnitude (Anderson and Anderson, Mol. Cell. Proteomics 1:845-867 (2002)). Second, the serum proteome is dominated by a few highly abundant proteins, that is, the 22 most abundant human serum proteins combined constitute 99% of total protein mass (Tirumalai et al., Mol. Cell. Proteomics 2:1096-1103 (2003)). Indeed, almost one half of total serum protein mass is represented by just one protein, albumin. Third, many of the serum proteins show complex 2D electrophoretic patterns, suggesting that they are extensively post-translationally modified, with glycosylation apparently being the major source of protein heterogeneity (Anderson and Anderson, Mol. Cell. Proteomics 1:845-867 (2002)). In fact, when protein spots from 2D electropherograms of serum were systematically identified by mass spectrometry, 5-7 protein spots on average were identified as products of the same gene (Pieper et al., R., Proteomics 3:1345-1364 (2003). Fourth, the serum proteome varies over time in an individual and among individuals in a population.

[0137] Useful platforms for serum proteome analysis should thus have minimally the following properties: first, sufficient analytical depth to reliably detect relatively low abundance proteins; second, quantitative accuracy to determine changes in the proteome pattern; third, reproducibility and robustness to detect disease-specific changes in a background of pattern changes unrelated to disease; fourth, the ability to identify distinct peptides for their cross-validation on different analytical platforms and comparison of results obtained from different research groups, studies and diseases; and fifth, high sample throughput to support studies with sufficient statistical power.

[0138] Disclosed herein (Example 2) is a method for quantitative serum proteome analysis. It is based on the selective isolation of those peptides from serum proteins that are N-linked glycosylated in the native protein, and the analysis of the complex peptide mixture representing the now de-glycosylated forms of these peptides by liquid chromatography mass spectrometry (LC-MS) and tandem mass spectrometry (MS/MS). By selectively isolating this subset of peptides, the procedure achieves a significant reduction in analyte complexity at two levels: first, a reduction of the total number of peptides due to the fact that every serum protein on average only contains a few N-linked glycosylation sites, and second, a reduction of pattern complexity by removing the oligosaccharides that contribute significantly to the peptide pattern heterogeneity. The method is reproducible, achieves increased analytical depth and higher throughput compared to the analysis of samples without selective analyte enrichment. Furthermore, in a controlled experiment, peptide patterns distinguishing the serum proteome of cancer-bearing mice from genetically identical untreated normal mice could be detected and discriminatory peptides could be subsequently identified. At present, this method affords one of the most comprehensive routine and high throughput analyses of the serum proteome. The methods are useful in a broad application in serum marker discovery research.

[0139] Mass spectrometry based proteomics is becoming one of the most important approaches for quantitative characterization of the function of biological systems. Due to the enormous complexity of the proteomes, the development of high throughput technologies capable of detecting and quantifying specific information-rich proteins is crucial for its applications in biotechnology, such as clinical diagnostics, drug metabolism studies, and improving the knowledge of fundamental biological processes. Disclosed herein is a novel approach for quantitative proteomics that builds on the extensive knowledge of proteomes, and a platform for the implementation of the concept (see Example 4). The disclosed analysis is related to serum analysis. The highly selective, high throughput platform is built based on a MALDI (matrix assisted laser desorption/ionization) TOF/TOF (time-of-flight) spectrometer and using stable isotope labeled peptides as internal standards. For each targeted protein, one (or more) peptide sequence that uniquely identifies the protein is selected, chemically synthesized and labeled with heavy stable isotope. The synthesized stable isotope labeled peptides were used as definitive signatures to represent the corresponding targeted proteins and spiked in the serum sample with known amounts. The detection and quantification of targeted proteins was accomplished using a complementary approach of specific mass matching, selective peptide sequencing and peptide quantification. The study has experimentally demonstrated the concept and feasibility of using mass spectrometry based proteomics as a screening technology for systematic detection and quantification of targeted proteins in a complex system at high throughput.

[0140] The comprehensive, quantitative analysis of proteomes is informative and challenging. It is informative because the comparative analysis of proteomes or fractions thereof identifies proteins that are present at different quantities in the samples compared. Such differences in turn have been used to identify cellular functions and pathways affected by perturbations and disease (Wright et al., Genome Biol. 5:R4 (2003); Flory and Aebersold, Prog. Cell Cycle Res. 5:167-171 (2003); Guina et al., T., Wu, M., Miller, S. I., Purvine, S. O., Yi, E. C., Eng, J. et al. J. Am. Soc. Mass Spectrom. 14:742-751 (2003); Aebersold, Nature 422:115-116 (2003); Flory et al., M. R., Griffin, T. J., Martin, D. and Aebersold, Trends Biotechnol. 20:S23-29 (2002); Shiio, Y., Donohoe, S., Yi, E. C., Goodlett, D. R., Aebersold, R. and Eisenman, R. N. EMBO J. 21:5088-5096 (2002); Rabilloud et al., J. Biol. Chem. 277:19396-19401 (2002)), identify new components and changes in the composition of protein complexes and organelles (Brand et al., Nat. Struct. Mol. Biol. 11:73-80 (2004); Himeda et al., Mol. Cell Biol. 24:2132-2143 (2004); Ranish et al., Nat. Genet. 36:707-713 (2004); Ranish, J. A., Yi, E. C., Leslie, D. M., Purvine, S. O., Goodlett, D. R., Eng, J. et al. Nat. Genet. 33:349-355 (2003); Aebersold, J. Am. Soc. Mass Spectrom. 14:685-695 (2003); Aebersold, J. Infect. Dis. 187 Suppl 2:S315-320 (2003); Patterson and Aebersold, Nat. Genet. 33 Suppl, 311-323 (2003); Griffin et al., Anal. Chem. 75, 867-874 (2003)) and have led to the detection of putative disease biomarkers Hale et al., Brief Funct. Genomic Proteomic 2:185-193 (2003); Shau et al., Brief Funct Genomic Proteomic 2:147-158 (2003)). Comprehensive proteome analysis is challenging because of the enormous complexity of the proteome. In comparison to the number of open reading frames in a genome the number of unique protein species expressed by it is vastly expanded by the action of post transcriptional processing mechanisms including protein modifications, alternative splicing and proteolytic processing. Consequently, to date, neither the complexity of a proteome nor its actual composition has been determined for any species.

[0141] Over the last few years a number of mass spectrometry-based quantitative proteomics methods have been developed that identify the proteins contained in each sample and determine the relative abundance of each identified protein across samples (Flory et al., Trends Biotechnol. 20:S23-29 (2002); Aebersold, J. Am. Soc. Mass Spectrom. 14:685-695 (2003); Aebersold, J. Infect. Dis. 187 Suppl 2:S315-320 (2003); Patterson and Aebersold, Nat. Genet. 33 Suppl, 311-323 (2003); Aebersold and Mann, Nature 422:198-207 (2003); Aebersold, R. and Cravatt, Trends Biotechnol. 20:S1-2 (2002); Aebersold and Goodlett, Chem. Rev. 101, 269-295 (2001); Tao and Aebersold, Curr. Opin. Biotechnol. 14:110-118 (2003)). Generally, the proteins in each sample are labeled to acquire an isotopic signature that identifies their sample of origin and provides the basis for accurate mass spectrometric quantification. Samples with different isotopic signatures are then combined and analyzed, typically by multidimensional chromatography tandem mass spectrometry. The resulting collision induced dissociation (CID) spectra are then assigned to peptide sequences and the relative abundance of each detected protein in each sample is calculated based on the relative signal intensities for the differentially isotopically labeled peptides of identical sequence. Therefore, in a single operation the identity of the proteins contained in the samples and their relative abundance are determined. While the methods differ in the way the stable isotopes are incorporated into the polypeptides and the precise analytical (separation; mass spectrometry; data processing) methods used, they have in common that in every experiment results are only obtained from those peptides for which in the tandem mass spectrometry (MS/MS) experiment precursor ions are selected, successfully fragmented and conclusively assigned to a peptide sequence. Therefore, in every proteomics experiment of this kind the proteome is rediscovered without the benefit of the data collected from prior experiments. Furthermore, it has previously been shown that this type of proteomic analysis is quite inefficient in that the number of successfully identified and quantified peptides is about an order of magnitude lower than the number of detectable peptides present in the sample (Li et al., Anal. Chem. 76:3856-3860 (2004)) and that it is biased towards the proteins of higher abundance Nesvizhskii and Aebersold, Drug Discov. Today 9:173-181 (2004); Nesvizhskii et al., Anal. Chem. 75:4646-4658 (2003); Keller et al., Anal. Chem. 74:5383-5392 (2002)).

[0142] In many studies it is necessary to analyze a large number of proteomes and to compare the results obtained from each analysis. In biomarker discovery studies for example, large numbers of samples are required to detect protein patterns that consistently associate with a specific condition within a large background of proteins that may randomly fluctuate within the population tested (Aebersold, Nature 422:115-116 (2003); Domon and Broder, J. Proteome Res. 3:253-260 (2004)). In the emerging field of systems biology, a key element is the quantitatively accurate and comprehensive measurement of the components that constitute the system in differentially perturbed states and the synthesis of these data into a model describing the system (Adv. Exp. Med. Biol. 547:21-30 (2004)). Therefore, it is essential that quantitative proteomics experiments can be carried out at high throughput.

[0143] Genomics-style biology can be separated into two distinct phases, a discovery phase in which all the possible elements of one type are discovered, and a browsing or screening phase, in which the list of all possible or known elements is searched for those that may be of interest in a particular study (Aebersold, Nature 422:115-116 (2003)). The transition from a discovery to a browsing mode of operation has been already implemented for genomic sequencing, gene expression array analysis and the analysis of single nucleotide polymorphisms (SNPs) (Aebersold, Nature 422:115-116 (2004)). Disclosed herein (see Example 4) is a method and its implementation in a platform to also transform quantitative proteomics from a discovery into a browsing mode of operation. The performance of the system was demonstrated by analyzing proteins contained in human blood serum. Based on the characteristics of the method which include vastly simplified data analysis, high throughput, absolute quantification of proteins in complex samples, reduced redundancy, the ability to search for and quantify specific protein isoforms and the potential for standardization of results between laboratories, the method is expected to become widely applicable in quantitative proteomics studies.

[0144] Serum proteins have been the focus for biomarker identification and disease detection. Currently, most current serum proteomic analyses focus on discovery and annotation of serum proteins due to the enormous complexity of the serum proteome as well as individual variations over time and within a population. However, the serum proteins and peptides identified from discovery phased studies define the boundary of the serum proteome and can identify so-called proteotypic peptides which uniquely identify a given protein and are consistently observed by a mass spectrometer. These proteotypic peptides can be used to screen the proteome to reveal constellations associated with specific biological processes or physiological conditions. Since most serum proteins are N-linked glycosylated at one or several tryptic peptides, it was therefore proposed to identify proteotypic N-linked glycopeptides for serum proteome analysis using a recently developed solid-phase extraction of glycopeptides (SPEG) method (see Example 7). First, over three thousand unique N-linked glycosylation sites representing over two thousand unique serum proteins were experimentally identified. These identified glycopeptides were then used to calculate the frequency of each amino acid at each position surrounding the N-linked glycosylation sequon (NX(T/S) and physico-chemical properties of peptides that can be detected by mass spectrometry. The refined glycosylation motif and peptide properties were then used to predict all potential N-linked proteotypic glycopeptides from a database of candidate proteins. Quantitative analysis of serum proteins using these identified and predicted proteotypic N-linked glycopeptides increases the throughput and sensitivity of serum analysis for biomarker discovery research.

[0145] Physiologists believe that individual genetic backgrounds and pathological changes in organs affect serum protein composition. This allows for a systematic and quantitative analysis of serum proteins for identifying disease biomarkers. This explains the current focus of numerous studies on serum proteome annotation for biomarker identification (Shen et al., Anal. Chem. 76:1134-1144 (2004); Anderson et al., Mol. Cell. Proteomics 3:311-326 (2004)). Two methods have been used preferentially to profile serum proteins. The first and most commonly used is protein/peptide patterns analysis. This is exemplified by two-dimensional gel electrophoresis (2DE), surface enhanced laser desorption ionization mass spectrometry (SELDI-MS), and liquid chromatography mass spectrometry (LC-MS). The limitations of this approach are that the molecules are not identified and that limited depth is achieved. The second is a more recently developed technique based on stable isotope tagging of proteins and automated peptide tandem mass spectrometry (MS/MS) (Shen et al., Anal. Chem. 76:1134-1144 (2004); Anderson et al., Mol. Cell. Proteomics 3:311-326 (2004); Pieper et al., Proteomics 3:422-432 (2003)). Due to the enormous complexity and high dynamic range of the plasma proteome, using the current abundance dependent proteomic approach, the MS/MS based method can only identify a small subset of the peptides, presumably the highly abundant peptides present in plasma proteome, and it is very difficult to access low-abundance proteins that represent new biomarkers.

[0146] In response to this challenge, some researchers have devised a “divide and conquer” strategy for analyzing subsets of the serum proteome to reduce complexity and to increase the detection limits of serum proteins by avoiding repetitive analyses of the most abundant proteins. Specifically, the most abundant serum proteins, for example, albumin and immunoglobulin, are removed by affinity depletion (Pieper et al., Proteomics 3:422-432 (2003); Pieper et al., Proteomics 3:1345-1364 (2003); Adkins et al., Mol. Cell. Proteomics 1:947-955 (2002)). In the second part of the “divide and conquer strategy,” proteins or peptides are fractionated according to physico-chemical properties, for example, size, charge, or hydropathy, prior to mass spectrometric analysis. Specific implementations include two- or three-dimensional peptide chromatography (Shen et al., Anal. Chem. 76:1134-1144 (2004); Adkins et al., Mol. Cell. Proteomics 1:947-955 (2002); Tirumalai et al., Mol. Cell. Proteomics 2:1096-1103 (2003).; and size fractionation prior to protein digestion and analysis by LC-MS/MS 66. Tirumalai et al., Mol. Cell. Proteomics 2:1096-1103 (2003). Alternatively, proteins that contain common distinguishing structural features in plasma proteins, such as carbohydrate groups or cysteine residues (Pieper et al., Proteomics 3:422-432 (2003); Guppy et al., Oncologist 7:437-443 (2002).have been selectively enriched prior to MS analysis.

[0147] In every study, extensive efforts have been used to discover new serum proteins and annotate a serum protein database. This discovery phase of serum protein analysis normally does not contain quantitative information about individuals related to disease because it is not sufficiently reproducible, but it does define the boundary of the serum proteome. Analogous to trends seen in genomic studies, where a discovery phase marked by high-throughput DNA sequencing was followed by a scoring phase using microarrays, this extensive discovery based proteomic analysis of serum proteins is extremely useful to transverse this discovery phase of serum protein analysis to scoring phased analyses using the peptides and proteins identified in these data sets. This was demonstrated using synthetic stable isotope labeled peptides and ordered array as example 77. Pan et al., Mol. Cell. Proteomics 4:182-190 (2005). In that study, quantitative analysis of the serum proteome using prior identified proteotypic peptides was determined. The method included the selection and chemical synthesis of isotopically labeled reference peptides that uniquely identify a particular protein, and the addition of a panel of such peptides to the sample mixture consisting of tryptic peptides from the proteome in question. The combined peptide samples were then separated by chromatography to generate ordered peptide arrays on the sample plate of a matrix-assisted laser desorption/ionization (MALDI) mass spectrometer, and detected by MALDI-TOF/TOF mass spectrometer.

[0148] To identify the proteotypic peptides that are the basis for a high throughput plasma proteome screening, a large scale isolation of formerly N-linked glycopeptides was performed using the recently developed method, SPEG (Zhang et al., Nat. Biotechnol. 21:660-666 (2003)). The isolated peptides were fractionated by strong cation exchange (SCX) and identified by a combination of liquid chromatography, tandem mass spectrometry (LC-MS/MS), and a suite of software to determine the peptide sequence and statistical analysis of identification confidence (Eng et al., J. Am. Soc. Mass. Spectrom. 5:976-989 (1994); Keller et al., Anal. Chem. 74:5383-5392 (2002). With a minimum peptide probability score of 0.5, 3244 nonredundant N-linked glycosylation sites were identified, representing 2585 unique proteins. 2106 peptides are unique to single database entry, and selected as proteotypic peptides, representing 1671 proteins. Using the identified N-linked glycosylation sites, the amino acid composition surrounding the consensus N-linked glycosylation sites was further determined and generated a predictor for physico-chemical properties of peptide that were likely to be detected by mass spectrometry. The refined NXT/S motif and peptide properties were then used to predict potential N-linked glycopeptides as proteotypic peptides by scanning the human IPI protein database. The experimentally identified and computationally predicted N-linked proteotypic peptides resulting from the database can be interrogated via a World Wide Web interface, UniPep, (db.systemsbiology.net/devPM/sbeams/cgi/PeptideAtlas/Glyco_prediction.cgi). This is intended to provide a fast and accurate way to screen the plasma proteome for biomarkers using proteotypic peptides as heavy isotopic standards in conjunction with mass spectrometry, and is expandable as more peptides are discovered and added.

[0149] It is understood that modifications which do not substantially affect the activity of the various embodiments of this invention are also provided within the definition of the invention provided herein. Accordingly, the following examples are intended to illustrate but not limit the present invention.

### EXAMPLE 1

### Isolation of Tryptic Peptides of Glycoproteins from Serum and N-linked Glycopeptides from Plasma

[0150] The isolation method was described previously (Zhang et al., Nat. Biotechnol. 21:660-666 (2003)). In detail, proteins from 0.75 ml of serum or 1 ml of plasma were changed to buffer containing 100 mM NaAc, 150 mM NaCl, pH 5.5 (coupling buffer). Sodium periodate solution at 15 mM was added to the samples. The samples were rotated in dark at room temperature for 1 hour. The sodium periodate was removed from the samples using a desalting column (Bio-Rad; Herculed, Calif.). Eight ml of hydrazide resin (Bio-Rad; Hercules, Calif.) equilibrated in coupling buffer was added to the sample. The sample and resin were capped securely and rotated end-over-end for 18 hours at room temperature. The non-glycoproteins were removed, and resin was washed 3 times with 20 ml of 8M urea/0.4M NH₄HCO₃. The proteins on the resin were denatured in 20 ml of 8M urea/0.4M NH₄HCO₃ at 37° C. for 30 min, followed by 3 washes with the urea solution. After the last wash and removal of the urea buffer, the resin was diluted 4 times with water. 200 μg of trypsin in 24 ml of water was added to digest the bound proteins at 37° C. overnight. Peptides were reduced by adding 8 mM TCEP (Pierce, Rockford Ill.) at room temperature for 30 min, and alkylated by adding 10 mM iodoacetamide at room temperature for 30 min. For serum sample, the trypsin released peptides were collected and further analysed by mass spectrometry. The resin was washed with 20 ml of 1.5 M NaCl 3 times, 80% acetonitrile 3 times, 100% methanol 3 times, and 0.1 M NH₄HCO₃ 6 times. N-linked glycopeptides were released from the resin by digestion with 6 μl of peptide-N-glycosidase F (New England Biolabs; Beverly, Mass.) overnight. The peptides were dried and resuspended in 0.4% acetic acid for LC-MS/MS analysis.

[0151] For separation of peptide by chromatography and analysis of peptides by mass spectrometry, the resulting peptide mixture was fractionated by two-dimensional chromatography (Han et al., Nat. Biotechnol. 19:946-951 (2001): (1) cation-exchange chromatography using a 2.1 mm 20 cm Polysulfoethyl A column (Poly LC Inc., Columbia, Md.) at a flow rate of 200 μl/min using 1-hour gradient from buffer A (20 mM KH₂PO₄, 25% acetonitrile, pH 3.0) to buffer B (20 mM KH₂PO₄, 350 mM KCl, 25% acetonitrile, pH 3.0); and (2) reverse-phase capillary chromatography using a 75 μm 10 cm self-packed C18 column at a flow rate of 250 nl/min using 1-hour gradient from buffer A (5% acetonitrile and 0.1% formic acid) to buffer B (35% acetonitrile). The peptide identification by collision-induced-dissociation (CID) was carried out in an automated fashion using the dynamic-exclusion option on Finnigan LCQ ion trap mass spectrometer (Finnigan, San Jose, Calif.) or ESI-QqTOF (Macromass, Beverly, Mass.).

[0152] For data analysis, CID spectra was searched using SEQUEST (Eng et al., J. Am. Soc. Mass Spectrom. 5:976-989 (1994)) against the human International Protein Index sequence database (version 2.21, downloaded from the European Bioinformatics Institute ftp.ebi.ac.uk/pub/databases/IPI/current/ipi.HUMAN.fasta.gz). The database search results were analysed by a suit of software tools including INTERACT (Han et al., supra, 2001), peptide probability (Keller et al., Anal. Chem. 74:5383-5392 (2002)), and protein prophet (Nesvizhskii et al., Anal. Chem. 75:4646-4658 (2003)) to sign the probability and confidence score for each identified peptides and proteins.

[0153] The protocol is illustrated in FIGS. 4 and 5. FIG. 4 shows a schematic of quantitative analysis of serum proteins. FIG. 5 shows an exemplary analysis with the addition of a standard peptide.

### EXAMPLE 2

### High Throughput Quantitative Analysis of Serum Proteins Using Glycopeptide Capture and LC-MS

[0154] This example describes analysis of serum proteins by capturing glycopeptides and analyzing by mass spectrometry. The analysis was performed on normal and cancer mice to identify differentially expressed glycopeptides associated with a cancer condition.

[0155] It is expected that the composition of the serum proteome can provide valuable information about the state of the human body in health and disease, and this information can be extracted via quantitative proteomic measurements. Suitable proteomic techniques need to be sensitive and capable of detecting potential biomarkers below the level of highly expressed proteins, to be reproducible and robust, to generate data sets that are comparable between experiments and laboratories, and to have high throughput to support studies with sufficient statistical power. High throughput quantitative analysis of serum proteins has been performed. Peptides that are N-glycosylated in the intact protein were selectively isolated and analyzed by LC-ESI-MS. A comparative analysis was performed to determine any resulting patterns indicating differential expression of glycopeptides between normal and cancer mice as potential biomarkers for the cancer condition. By focusing selectively on the few N-linked glycopeptides per serum protein, the complexity of the analyte sample is significantly reduced and the sensitivity and throughput of serum proteome analysis are increased. The results show that sera from normal mice and genetically identical mice with carcinogen induced skin cancer can be unambiguously discriminated using unsupervised clustering of the resulting peptide pattern. It was further determined by tandem mass spectrometry that some of the glycopeptides were consistently elevated in cancer mice compared to their healthy littermates.

[0156] Serum from normal mice and mice with carcinogen induced skin cancer were analyzed essentially as described previously (Zhang et al., Nat. Biotechnol. 21:660-666 (2003) and essentially as described in Example 1. FIG. 6 shows a schematic outline of the procedure for glycopeptide profiling of serum proteins using LC-MS. Serum samples were obtained from normal mice and mice having carcinogen induced skin, and N-linked glycopeptides were isolated essentially as described in Example 1. Peptides were analyzed by LC-MS, and peptides that discriminated between normal and cancer mice were determined. LC-MS/MS analysis was then performed on selected precursor ions.

[0157] Table 1 shows that the glycopeptide capture-and-release method reduces the number of peptides to be analyzed from each serum protein and reduces sample complexity for serum profiling.

TABLE 1
Reduction of sample complexity
for serum profiling using
glycopeptide capture and release.

| | A | B | C | D |
|---|---|---|---|---|
| Total number of peptides | 2889 | 355 | 338 | 166 |
| Number of peptides for each protein | 29.8 | 3.66 | 3.48 | |

A: Number of tryptic peptides
B: Number of glycopeptides
C: Number of identified glycopeptides
D: Number of N-linked glycosylation sites

[0158] The use of the glycopeptide capture method greatly reduces sample complexity, thereby increasing the sensitivity of analysis, particularly of less abundant serum proteins. A comparison of the analysis of glycopeptides from 5 μl of serum (left panel) and tryptic peptides from 0.05 μl of serum was performed. Proteins were analyzed in 100 min LC-MS. It was found that 100 times the amount of serum can be analyzed due to the reduction in complexity from isolating glycopeptides and omitting analysis of abundant non-glycosylated proteins, thus allowing the analysis of less abundant serum proteins.

[0159] The high throughput serum analysis method was highly reproducible. The distribution of CV (coefficient of variance) from 9 repeated LC-MS analysis of the same sample was determined. The distribution of CV from 4 repeated sample preparations using the glycopeptide capture method and LC-MS analysis was also determined. The distribution of CV obtained from 5 normal male mice of the same litter was additionally determined.

[0160] Unsupervised hierarchical clustering analysis of N-linked glycopeptides can separate carcinogen induced cancer mice from normal mice. Both increased and decreased abundance was observed for various peptides in comparison of cancer mice with normal mice. In some cases, peptide abundance was higher than the mean peptide intensity of normal mouse sera. In other cases, peptide abundance was lower compared to the mean of this peptide in different, that is, normal mouse sera.

[0161] The method of glycopeptide capture allows the identification of peptides that are elevated in carcinogen induced cancer mice. The abundance of an identified peptide from serum amyloid P-component with m/z value of 709.7 in sera of normal and cancer mice was determined by highly reproducible LC-MS analysis.

[0162] These results demonstrate that selectively isolating those peptides that are N-glycosylated serum proteins has a number of favorable consequences for the analysis of the serum proteome. Together with the high reproducibility of the method, the unprecedented serum proteome coverage achieved at a moderate throughput indicates that the method is useful for the detection of proteins or protein patterns that distinguish individuals in different physiological states. These studies were extended and are described below.

[0163] Materials and Reagents. For all chromatographic steps, HPLC grade reagents were purchased from Fisher Scientific (Pittsburgh, Pa., USA). PNGase F was from New England Biolabs (Beverly, Mass.). Hydrazide resin was from Bio-Rad (Hercules Calif.). All other chemicals and the human serum sample used in this study were purchased from Sigma (St. Louis, Mo., USA).

[0164] Chemical induction of mouse skin tumors. Male mice of strain NIHO1a were subjected to the two-stage skin carcinogenesis protocol (Kemp et al., Cell 74:813-822 (1993)). Five littermates were used; 2 untreated and 3 treated with carcinogen. The shaved backs of three 8-week old mice were treated with a single dose of the carcinogen 7,12 dimethylbenz[a]anthracene (DMBA) (Sigma; 25 mg in 200 ml acetone). Initiated cells were promoted with 12-O-tetradecanoylphorbol-13-acetate (TPA) twice a week for 15 weeks, giving rise to papillomas that were hyperplastic, well-differentiated, benign lesions consisting of keratinocytes together with stromal tissue. Papillomas appeared as early as 8 weeks after DMBA initiation and continued to grow for the next several months. A small percentage of these benign papillomas progressed to squamous cell carcinomas (SCC). At week 22 after DMBA initiation, all mice were sacrificed and whole blood collected by heart puncture with a 21G needle and Icc syringe. Blood was allowed to clot for 1 hr at room temperature. Sera were collected by centrifugation at 3000 rpm. The untreated mice contained no tumors, while the DMBA/TPA treated mice each had at least one carcinoma as confirmed by histological analysis.

[0165] Preparation of peptide samples for mass spectrometry analysis. Formerly N-linked glycosylated peptides were isolated and labeled using N-linked glycopeptide capture procedure as described previously (Zhang et al., Nat. Biotechnol. 21:660-666 (2003)). Proteins from 100 μl of serum were used in isolation and isotope labeling of formerly N-linked glycopeptides, and peptides from 5 μl of original serum were used in each mass spectrometry analysis.

[0166] To prepare tryptic peptides from serum proteins, proteins from 1 μl (80 μg) of mouse serum were denatured in 20 μl of 8M urea/0.4M NH₄HCO₃ for 30 min at room temperature. The proteins were diluted 4 times with water, after which 1 μg of trypsin was added and the proteins were digested at 37° C. overnight. The peptides were then reduced by adding 8 mM Tris(2-carboxyethyl)phosphine (TCEP)(Pierce, Rockford Ill.) at room temperature for 30 min and alkylated by adding 10 mM iodoacetamide at room temperature for 30 min. The peptides were dried and resuspended in 0.4% acetic acid. Peptides from 0.05 μl of original serum (4 μg original serum proteins) were used for each LC-MS analysis.

[0167] Analysis of peptides by mass spectrometry. The peptides and proteins were identified using MS/MS analysis using an LCQ ion trap mass spectrometer (Thermo Finnigan, San Jose, Calif.) as described previously (Gygi et al., Nat. Biotechnol. 17:994-999 (1999)). For quantitative analysis of peptides using LC-MS, an ESI-QTOF (liquid chromatography electrospray ionization quadrupole-time-of-flight) mass spectrometer (Waters, Beverly, Mass.) was used. In both systems, peptides isolated from 5 μl of serum sample using the glycopeptide capture method were injected into a homemade peptide cartridge packed with Magic C18 resin (Michrome Bioresources, Auburn, Calif.) using a FAMOS autosampler (DIONEX, Sunnyvale, Calif.), and then passed through a 10 cm×75 μm inner diameter microcapillary HPLC (μ-LC) column packed with Magic C18 resin (Michrome Bioresources, Auburn, Calif.). The effluent from the μ-LC column entered a homebuilt electrospray ionization source in which peptides were ionized and passed directly into the respective mass spectrometer. The C18 peptide trap cartridge, p-ESI-emitter/μ-LC pulled tip column combination, a high voltage line for ESI and the waste line were each connected to separate ports of a four port union (Upchurch Scientific, Oak Harbor, Wash.) constructed entirely out of polyetheretherketone (PEEK)(Yi et al., Rapid Commun. Mass Spectrom. 17:2093-2098 (2003)). A linear gradient of acetonitrile from 5%-32% over 100 min at flow rate of ˜300 nL/min was applied. During the LC-MS mode, data was acquired with a profile mode in the mass range scan between m/z, 400 and 2000 with 3.0 sec scan duration and 0.1 sec interscan. After completion of the LC/MS runs, inclusion peptide mass lists were created from data analysis software. The inclusion lists were then used for targeted LC/MS/MS analysis for peptide/protein identifications with the remaining of samples.

[0168] ESI-QTOF data analysis: A suite of software tools were developed or optimized in house to analyze LC-MS data for this project and will be published separately (Li et al. manuscript in preparation). The software tools use LC-MS data generated by ESI-QTOF analysis of formerly N-linked glycopeptides from serum samples and sequentially perform the following tasks to determine peptides that are of different abundance in cancer and normal mice, respectively.

[0169] 1. Peptide list: A list of peptide peaks was generated from each LC-ESI-MS run. The tool performing this operation was a straightforward extension of a previous tool for the analysis of LC-MALDI-MS data (Griffin et al., Anal. Chem. 75:867-874 (2003)). That tool was modified to take into account the fact that, in ESI-MS, peptides are observed in different charge states. Peaks were selected if the signal to noise ratio exceeded 2.

[0170] 2. Peptide alignment: Peptides detected in individual LC-MS patterns were aligned mainly based on peptide mass. The retention time was then used to align peptides with the same m/z value. The software tool accounted for shifts in the retention time in different LC-MS analyses during peptide alignment. Peptide alignment was facilitated by the following factors: i) the glycopeptide capture procedure significantly simplifies the sample complexity, ii) the high mass accuracy achieved in ESI-QTOF instrument, and iii) the optimized HPLC system that produced highly consistent and reproducible peptide patterns. In the mouse studies, peptides that appeared at least in two of three analyses in either group were selected for further quantitative analysis.

[0171] 3. Peptide abundance ratio: An abundance ratio of matched peptides in different samples was determined for each peptide peak using the same method as described in the ASAPRatio software tool developed for LC-ESI-MS/MS data (Li et al., Anal. Chem. 75:6648-6657 (2003)). Briefly, the software uses spectra from multiple LC-MS analyses of a peptide peak (with same mass-to-charge ratio (m/z), charge state, and close retention time) and calculates one ratio for each peptide peak. In the present study, ratios calculated for different charge states of the same peptide were not combined. The algorithm also estimated a noise background level in each spectrum and subtracts that value from the signal intensities when calculating the peak area.

[0172] 4. Clustering analysis: The lists of matched peptides with their relative signal intensities were subjected to unsupervised hierarchical clustering (Eisen et al., Proc. Natl. Acad. Sci. USA 95:14863-14868 (1998)) to identify peptides distinguishing cancer samples from normal samples. Prior to clustering, the data was transformed to log value and the mean intensity of each peptide cross all samples was normalized; Peptides present at least in 50% of the total samples were used for clustering analysis.

[0173] The objective of the method is the generation of reproducible peptide patterns representing the serum proteome, leading to the detection of peptides that discriminate between related groups of proteomes and the subsequent identification of these discriminatory peptides. The method is schematically illustrated in FIG. 6 and consists of four steps. (1) Sample preparation. Peptides that contain N-linked carbohydrates in the native protein were isolated in their de-glycosylated form using a recently described solid-phase capture-and-release method (Zhang et al., Nat. Biotechnol. 21:660-666 (2003)). (2) Pattern generation. Isolated peptides were analyzed by LC-MS to generate three-dimensional (retention time, m/z, and intensity) patterns. (3) Pattern analysis. Peptide patterns obtained from different samples were compared and the discriminatory peptides determined. (4) Peptide identification. Discriminatory peptides and the proteins from which they originated were identified by tandem mass spectrometry and sequence database searching.

[0174] To determine the selectivity of the glycopeptide capture method for serum protein analysis, serum samples from four genetically identical mouse littermates were individually processed using the N-linked glycopeptide capture-and-release method and the isolated peptides were analyzed by LC-MS/MS. The resulting collision induced dissociation (CID) spectra were searched against the mouse International Protein Index sequence database (version 1.24) and the database search results were further statistically analyzed using the PeptideProphet software tool (Keller et al., Anal. Chem. 74:5383-5392 (2002)). From four LC-MS/MS analyses of the mouse sera, 1722 CID spectra resulted in peptide identifications from database search with peptide probability scores of at least 0.99 (corresponding to a false positive error rate of 0.0007 (Keller et al., Anal. Chem. 74:5383-5392 (2002)). The identified sequences were then examined for the presence of the known consensus N-linked glycosylation motif (N-X-T/S, where X=any amino acid except proline). The number of proteins represented by the selected peptides were determined using INTERACT (Han et al., Nat. Biotechnol. 19:946-951 (2001)). The number of identified proteins and peptides are summarized in Table 2. A total of 319 unique peptides were identified, representing 93 unique proteins. 93.6% of the identifications, 81.8% of unique peptides, and 93.5% of identified proteins contained the consensus N-linked glycosylation motif (Table 2).

TABLE 2
Total number of peptide identifications,
unique peptides, and unique proteins, and the
proportion of each that contain N-X-T/S motif.

| | | Peptides | Percentage |
|---|---|---|---|
| | | containing | of motif |
| | Total | N-X-T/S | containing |
| | peptides | motif | peptides |
| Number of identifications | 1722 | 1611 | 93.6% |
| Number of unique peptides identified | 319 | 261 | 81.8% |
| Number of unique proteins identified | 93 | 87 | 93.5% |

[0175] The peptide identified as riot containing the consensus N-linked glycosylation motif can be grouped into two pools. The first contains peptides that are correctly identified and the second is peptides that are incorrectly identified by SEQEST search (false positives). In the present analysis, the false positive error rate was estimated by the PeptideProphet statistical model. To further estimate the selectivity of the isolation method, the fraction of peptides identified without consensus N-linked glycosylation motif was calculated as a function of the PeptideProphet probability values. The data are shown in FIG. 7. It is apparent that the fraction of peptides without N-X-S/T motif decreases as the stringency of the identification criteria increases. Concurrently, as expected, the number of false positive peptide identifications also decreases. Significantly, and consistent with the data in Table 2, the percentage of peptides without N-X-S/T motif plateaus out at approximately 6.4%, as the false positive error rate approaches 0. It is therefore concluded that the peptide isolation method used has a selectivity that is not lower than 93.6%.

[0176] Reduction in the complexity of serum-derived peptide mixtures obtained via the glycopeptide capture-and-release method. The data described above was used to estimate the reduction in sample complexity achieved via the glycopeptide capture-and-release method. A total of 93 proteins were identified collectively from the four serum samples analyzed. Disregarding the complexity caused by protein post-translational modifications, the 93 identified proteins were expected to generate an average of 28.8 of tryptic peptides per protein. Of these, 3.6 peptides on average contained the N-X-S/T motif and were therefore designated potentially N-linked glycosylated peptides. Among the 93 identified proteins in this study, an average of 3.6 peptides representing 1.8 unique N-linked glycosylation sites per protein were actually identified. By comparing the number of unique N-linked glycosylation sites identified with the number of predicted peptides containing consensus N-linked glycosylation motif, it was found that 50% of the predicted glycosylated peptides had been detected. Interestingly, an analysis of the actual occupancy rate of potential N-linked glycosylation sites in glycoproteins in the crystallographic database showed approximately 65% site occupancy (Petrescu et al., Glycobiology 14:103-114 (2004)). Collectively, these data indicate that the glycopeptide capture-and-release from serum proteins, significantly reduces sample complexity and that the method captured a significant fraction of the potentially available N- linked glycosylated peptides.

[0177] To determine whether the increased sensitivity achieved by reducing sample complexity was sufficient to detect serum protein biomarkers of clinical relevant concentration, we related data obtained in this study to the concentrations of human serum marker proteins (Putnam, The plasma proteins: Structure, Function, and Genetic Control, 2nd ed. Academic Press, New York, N.Y. (1975); Lum and Gambino, Am. J. Clin. Pathol. 61:108-113 (1974)). A direct comparison of the protein compositions between the human and mouse serum proteomes has not previously been determined. However, the serum two-dimensional (2-D) maps of human and mouse are sufficiently similar to allow an approximate comparison of the concentrations of the proteins identified in this study between human and mouse (Duan et al., Electrophoresis 25:3055-3065 (2004)). From the 93 proteins identified above, several proteins are known to be present in human serum at low μg/ml concentration (Table 3). These include carboxypeptidase N and coagulation factors II, V, XII, and XIII. Except for epidermal growth factor receptor and serum amyloid P-component, none of the other proteins listed in Table 3 have been identified in previous mouse 2-D map, suggesting that they are present at low abundance in mouse serum (Duan et al., Electrophoresis 25:3055-3065 (2004)). To estimate the detection sensitivity, the peak intensities of the identified peptides from these proteins were calculated using the intensities of chromatographic peaks at the charge states used for peptide identification. Examination of the peak intensities indicated an average peptide peak intensity of 2.7×10⁷, which is ˜900 times greater than the observed background signal for these experiments (Table 3). This indicates that even without multidimensional separation, serum proteins at concentrations on the order of ng/ml may be detected by LC-MS of formerly N-linked glycopeptides.

[0178] Table 3. Peak intensities of formerly N-linked glycopeptides identified from mouse sera and the reported concentration of their corresponding proteins in human serum.

[0179] Table 3. Peak intensities of formerly N-linked glycopeptides identified from mouse sera and the reported concentration of their corresponding proteins in human serum.

TABLE 3

Peak intensities of formerly N-linked glycopeptides identified from mouse sera and the
reported concentration of their corresponding proteins in human serum.

| | | | | |
|---|---|---|---|---|
| Protein name | IPI Number | Peptide sequences | μg/ml | Intensity |

| | | | | |
|---|---|---|---|---|
| kallikrein B, plasma 1 | IPI00113057 | R.IVGGTN#ASLGEWPWQVSLQVK.L | 50 | 1.50 × 10⁷ |
| | | K.LQTPLN#YTEFQKPICLPSK.A | | 3.30 × 10⁷ |
| coagulation factor II | IPI00114206 | R.CAMDLGVNYLGTVN#VTHTGIQCQLWR.S | 20 | 1.30 × 10⁷ |
| | | R.WVLTAAHCILYPPWDKN#FTENDLLVR.I | | 2.90 × 10⁷ |
| coagulation factor V | IPI00117084 | K.SN#ETALSPDLN#QTSPSM*STDR.S | 20 | 1.50 × 10⁶ |
| Similar to carboxypeptidase N | IPI00119522 | E.ITGSPVSN#LSAHIFSN#LSSLEK.L | 35 | 1.10 × 10⁸ |
| | | R.DGSDSAAM*VYN#SSQEWGLR.S | | 3.20 × 10⁷ |
| Epidermal growth factor | IPI00121190 | R.DCVSCQN#VSR.G | | 8.30 × 10⁶ |
| receptor | | R.DIVQNVFM*SN#M*SM*DLQSHPSSCPK.C | | 1.80 × 10⁷ |
| | | K.DTLSIN#ATNIK.H | | 1.10 × 10⁷ |
| coagulation factor XIII, | IPI00122117 | K.EQETCLAPELEHGN#YSTTQR.T | 10 | 5.30 × 10⁶ |
| beta subunit | | R.TYEN#GSSVEYR.C | | 8.40 × 10⁶ |
| coagulation factor XII | IPI00125393 | R.HN#QSCEWCQTLAVR.S | 30 | 3.30 × 10⁷ |
| (Hageman factor) | | | | |
| interferon (alpha and beta) | IPI00132817 | K.SGPPAN#YTLWYTVM*SK.D | | 1.70 × 10⁷ |
| receptor 2 | | | | |
| serum amyloid P-component | IPI00267939 | K.LIPHLEKPLQN#FTLCFR.T | 20 | 7.00 × 10⁷ |
| | | | Average | 2.70 × 10⁷ |
| | | | Background | 3.00 × 10⁴ |
| | | | SNR | 8.99 × 10² |

N# indicates the N-linked glycosylation site.
M* = oxidized methionine
SNR = signal to noise ratio

[0180] Assessment of reproducibility of LC-MS patterns following glycopeptide capture-and-release of serum proteins. Out of the 319 peptides and 93 proteins identified by four LC-MS/MS analyses, 109 unique peptides and 52 unique proteins were identified from all four analyses. The number of peptides identified in all four LC-MS/MS runs is low compared to the total number of unique peptides identified (34.2%). The Pep3D software tool was used (Li et al., Anal. Chem. 76:3856-3860 (2004)) to determine whether these observations were due to peptide under sampling in the LC-MS/MS experiment or whether they indicated poor pattern reproducibility. The results show that, first, as expected, the LC-MS patterns of the peptides from individual mouse serum were consistent. Second, due to the complexity of the sample, not all peptides in a given analysis were selected for MS/MS analyses and subsequently identified. Third, as far as could be determined from the difference between the number of identified peptides from MS/MS analysis and total peptides present in a sample from MS analysis, only a small portion of peptides, predominantly the high abundance peptides from each sample were selectively identified by MS/MS analyses. Fourth, the differences between peptide/protein identifications by MS/MS analyses between different samples were caused mainly by the fact that only a fraction of total peptides was identified by MS/MS analysis in the data dependant mode of operation. Collectively, these results suggest that LC-MS analyses of glycopeptides isolated from genetically identical mice are reproducible. However, peptide/protein identifications using MS/MS analyses, due to peptide under sampling, results in a relatively small number of peptide identifications and a seemingly poor reproducibility of the method.

[0181] The reproducibility of the peptide patterns obtained by LC-MS was examined. Four 50 μl aliquots from a single serum sample were processed in parallel to generate four isolates and then analyzed by LC-MS. First, to assess LC-MS reproducibility, equal amounts of each isolate were combined and analyzed the combined sample 9 times by LC-MS using a 100 min reverse phase gradient. In house developed software tools were used to detect peaks in the resulting patterns, to measure peak intensity, and to align corresponding peptide peaks between multiple patterns (Li et al. manuscript in preparation). From these data, the average intensity, standard deviation of intensity, and coefficient of variance (CV) was calculated for each peptide. A histogram of CV from the 9 repeat analyses of identical samples by LC-MS is shown in FIG. 8 (rectangles). The mean and median CVs observed in the 9 repeat LC-MS analyses of the same sample were 28.3% and 21.8%, respectively. Next glycopeptides were analyzed from the four individual isolates as described above to determine reproducibility with respect to peptide isolation. This data is shown in FIG. 8 (squares). The mean and median CVs for the four replicate sample preparations were 25.7% and 21.6%, respectively, and therefore comparable to the analogous values from repeat LC-MS analysis of identical samples. These results indicate that sample preparation does not significantly contribute to the variability of observed peptide patterns.

[0182] Application of the method to distinguish sera from normal and skin cancer-bearing mice. To test the hypothesis that the serum proteome profiles from individuals in different physiological states can be differentiated, the glycopeptide capture-and-release method was applied to serum samples from mice in which skin tumors had been induced and from normal untreated littermates. Skin tumors were induced in a well established skin carcinoma model via topical treatment of the skin with a single dose of DMBA followed by repeated treatments with the tumor promoter TPA (Kemp et al., Cell 74:813-822 (1993)). This treatment gives rise to papillomas that are hyperplastic and well-differentiated benign lesions of the skin, each one originating from a single initiated cell (Brown et al., K., Cell 46:447-456 (1986); Quintanilla et al., Nature 322:78-80 (1986)). After a latency period of several months, a small percentage of these lesions progress to squamous cell carcinomas.

[0183] From the sera of three cancer-bearing male mice (C1, C2, and C3) and two untreated normal male mice (N1 and N2) from the same litter, glycopeptides were isolated and analyzed by LC-MS as described above. The sample from N1 was analyzed by LC-MS twice (N1a, N1b), thus a total of six LC-MS patterns were generated. After aligning peptide peaks from all six patterns, over 3000 peptide peaks were found to occur in at least 2 of the 3 analyses from either normal or cancer-bearing mice. The six LC-MS patterns consisting of the peptide peaks matched between the samples and their associated intensities were next subjected to unsupervised hierarchical clustering (Eisen et al., Proc. Natl. Acad. Sci. USA 95:14863-14868 (1998)). Neither predefined reference vectors nor prior knowledge about the nature of each pattern (untreated normal versus cancer-bearing) was used. The results of this unsupervised hierarchical clustering analysis are represented by a tree structure. The lengths of the branches among different samples are proportional to the similarity of the obtained peptide patterns. From this clustering, it is apparent that the cancer-bearing mice (C1, C2, and C3) were clustered together and clearly differentiated from the patterns obtained from their sex and litter matched normal mice (N1a, N1b, and N2) which were also clustered together.

[0184] To test whether the same serum samples could be equally differentiated without applying the glycopeptide capture-and-release enrichment method, tryptic peptides from 50 nl of each unprocessed serum sample were subjected to the same LC-MS and pattern analysis procedure. Peptide peaks were aligned from the resulting patterns, and a similar number of peptide peaks were detected as for the glycopeptide enriched samples. In contrast to the glycopeptide enriched samples, unsupervised clustering of the total serum peptide patterns did not differentiate the cancer group from normal group. These results indicate that the larger number of proteins and/or the deeper penetration into the serum proteome achieved by the glycopeptide selection chemistry is critical to the successful differentiation between serum samples according to the clinical state of the individuals.

[0185] The glycopeptide enriched samples were then further analyzed by MS/MS to identify peptides that increase in abundance in cancer-bearing mice from untreated normal animals. The m/z and retention time coordinates of these peptides were added to the inclusion list on a tandem mass spectrometer and identified by LC-MS/MS and sequence database searching. FIG. 9A shows a peptide at m/z of 709.7 (eluted at ˜65 min) that, while showing variation between individuals, also clearly showed consistently increased abundance in cancer-bearing mice (C1, C2, C3) compared with normal animals (N1a, N1b, N2). The signal at m/z of 709.7 was subsequently identified as a peptide with the amino acid sequence LIPHLEKPLQN#FTLCFR (in which N# indicates the formerly N-linked glycosylation site; SEQ ID NO:) derived from serum amyloid P component in mouse. This is an acute-phase protein whose expression is known to be elevated during inflammation (Mole et al., J. Immunol. 141:3642-3646 (1988).

[0186] The differential abundance of the identified peptides was verified by applying accurate quantitative analysis using stable isotope labeling. In these experiments, the amino groups of the glycopeptides were isotopically labeled with d0 and d4 succinic anhydride, respectively, while the peptides were still attached to the solid support during their isolation (Zhang et al., Nat. Biotechnol. 21:660-666 (2003)). Equal aliquots of samples from two cancer-bearing mice (C2 and C3) and two normal mice (N1 and N2) were reverse labeled with either the d0- and d4-succinic anhydride and the released peptides were combined in the following way: sample N1 (d0) was paired with sample C2 (d4); sample C2 (d0) was paired with sample N1 (d4); sample N2 (d0) was paired with sample C3 (d4); and sample C3 (d0) was paired with sample N2 (d0). The combined samples were analyzed by LC-MS/MS. The m/z of peptides identified with higher abundance in cancer-bearing mice using LC-MS analysis and pattern matching were selected and the corresponding mass for light and heavy succinic anhydride labeled peptides were included in the mass inclusion list (with a 100 Dalton addition for the light form of succinic anhydride and a 104 Dalton addition for the heavy succinic anhydride labeling) and then sequenced by MS/MS analysis using ESI-QTOF and identified by database searching. Table 4 lists the identified peptides and proteins with elevated protein level in the cancer-bearing mouse group detected by LC-MS analysis and verified by reverse stable isotope labeling. The LC-MS spectrum obtained for the same peptide from serum amyloid P-component is shown in FIG. 9B. The increased level of this peptide in cancer-bearing mice quantified by isotopic labeling was consistent with that determined by LC-MS analysis (FIG. 9A).

TABLE 4

Identification of peptides and proteins with elevated abundance in treated
cancer-bearing mice

CID spectrum
number given in
Supplementary

| | | | |
|---|---|---|---|
| Protein name | IPI number | Peptide sequences | FIG. 1 online |

| | | | |
|---|---|---|---|
| Ig gamma-1 chain C region | IPI00109911 | R.EEQFN#STFR.S | 332 |
| secreted form | | | |
| serum amyloid P-component | IPI00267939 | K.LIPHLEKPLQN#FTLCFR.T | 333 |
| haptoglobin | IPI00274017 | K.NLFLN#HSETASAK.D | 334 |
| | | K.N#LTSPVGVQPILNEHTFCAGLTK.Y | 335 |
| leucine-rich alpha-2-glycoprotein | IPI00129250 | R.SLPPGLFSTSAN#LSTLVLR.E | 336 |
| complement component factor h | IPI00130010 | K.DNSCVDPPHVPN#ATIVTR.T | 337 |
| fetuin beta | IPI00134837 | R.VLYLPAYN#CTLRPVSK.R | 338 |
| | | R.RVLYLPAYN#CTLRPVSK.R | 339 |

[0187] Collectively these data indicate that the LC-MS-based analysis of isolated, formerly N-linked glycosylated peptides reproducibly detected peptides of different abundance in serum samples of cancer and normal mice and that the discriminatory peptides could be identified by MS/MS analysis.

[0188] Described above is a method for high throughput quantitative analysis of serum proteins using glycopeptide capture and LC-MS. It consists of the selective and reproducible isolation of those peptides from the serum proteome that are modified by N-linked glycosylation in the intact protein. The complex mixture of the de-glycosylated forms of these peptides was then analyzed by LC-MS. The mass of discriminatory peptides was determined using pattern matching software, and these peptides were subsequently identified by MS/MS. These results indicate that the glycopeptide capture-and-release method is specific for the isolation of N-linked glycopeptides. On average, 3.6 peptides were isolated per protein representing an average of 1.8 glycosylation sites per protein. This is contrasted with a predicted 28.8 unique tryptic peptides per protein calculated from the pool of identified proteins. The data also indicates that this reduced sample complexity resulted in an increase in sensitivity compared to the analysis of non-selected serum digests using an identical analytical platform. To test its suitability for analysis of disease, the method was applied to the differentiation of sera from genetically identical mice that were either untreated normal or cancer-bearing. The resulting peptide patterns could clearly and correctly be differentiated into two groups via unsupervised clustering. Some of the discriminatory peptides were further identified by MS/MS and their differential abundance in cancer versus control mice was verified by accurate quantification using stable isotope labeling.

[0189] Ideally, for the detection and validation of protein biomarkers in serum, the complete serum proteomes of multiple individuals representing different clinical states would be completely and quantitatively analyzed. Due to the enormous complexity of the serum proteome and technical limitations, all the current proteomic technologies for such analyses can only sample a small part of the proteome, predominantly the most abundant proteins (Anderson and Anderson, Mol. Cell. Proteomics 1:845-867 (2002); Zhang et al., Curr. Opin. Chem. Biol. 8:66-75 (2004)). For example, 2DE-based studies have identified about 300 serum proteins collectively (Anderson and Anderson, Mol. Cell. Proteomics 1:845-867 (2002); Pieper et al., R., Proteomics 3:1345-1364 (2003); Anderson et al., Mol. Cell. Proteomics 3:311-326 (2004). It has also been estimated that SELDI-TOF approaches have limited detection of low abundant proteins due to the high dynamic range of serum proteins and the limited binding capacity of the SELDI chip (Diamandis, Mol. Cell. Proteomics 3:367-378 (2004)). In the method described above, the selective isolation of the N-linked glycosylated peptides resulted in a substantial improvement in the concentration limit of protein detected due to the reduction in sample complexity.

[0190] A number of factors contribute to this effect. First, the number of peptides per protein isolated after applying the glycopeptide capture-and-release method is significantly reduced. The 93 proteins identified in this study are predicted to generate an average of 28.8 tryptic peptides per protein. Of these, only 3.6 on average contain the N-linked glycosylation consensus motif and can be potentially glycosylated, and an average of 3.6 peptides representing 1.8 unique N-linked glycosylation sites per protein were actually identified. By comparison, a similar number of N-linked glycosylation sites identified per protein was reported by Kaji and colleagues (1.8 sites per protein) in a study in which N-linked glycopeptides were isolated from C. elegans proteins using lectin enrichment (Kaji et al., Nat. Biotechnol. 21:667-672 (2003)). Second, the most abundant serum protein, albumin, does not contain N-linked glycosylation motifs and therefore is effectively transparent to the analysis. Since albumin itself comprises almost 50% of total serum protein content, exclusion of albumin eliminates numerous peptides that otherwise dominate serum peptide samples. Indeed, quantitative removal of albumin, a goal that is normally attempted by use of costly affinity depletion methods (Pieper et al., Proteomics 3:422-432 (2003) is an automatic by-product of the glycopeptide capture method. Third, the method only selects peptides from the constant region of immunoglobulins and thus dramatically reduces the number of immunoglobulin-derived peptides. This is important since immunoglobulins constitute approximately 20% of total protein mass in serum (Putnam, The plasma proteins: Structure, Function, and Genetic Control, 2nd ed. Academic Press, New York, N.Y. (1975)) and comprise a population of an estimated 10 million different molecules (Anderson and Anderson, Mol. Cell. Proteomics 1:845-867 (2002)). The difficulty of penetrating the population of immunoglobulins in unbiased serum proteome analyses was recently illustrated in a study in which a tryptic digest of serum was analyzed by ultra-high-efficiency strong cation exchange LC/RPLC/MS/MS. Of the 1061 plasma protein identifications reported, 38% were immunoglobulins (Shen et al., Anal. Chem. 76:1134-1144 (2004)). It is also likely that an even more significant fraction of peptides observed in LC-MS patterns of unbiased serum protein digests are derived from immunoglobulins since nucleic acid and protein sequence databases dramatically underreport the contribution of somatic combinatorial gene rearrangement to immunoglobulin diversity. Fourth, many serum proteins are post-translationally altered by phosphorylation, glycosylation, acetylation, methionine oxidation, protease processing and other mechanisms, resulting in multiple forms for each protein. It has been estimated that one protein may generate on the order of 100 species (Anderson and Anderson, Mol. Cell. Proteomics 1:845-867 (2002)). In the case of glycosylation, the oligosaccharide structures attached at each site are typically diverse, compounding the complexity of the peptide mixture. The peptides isolated by the glycopeptide capture method remove the heterogeneous oligosaccharides, and thus by isolating a few peptides per protein only, also eliminate other significant sources of pattern heterogeneity.

[0191] The cumulative effect of these factors is the generation of a peptide sample from the serum proteome with a moderate redundancy of an average of 3.6 unique peptides per protein. Theoretically, an average of 3.6 potential N-linked glycopeptides (containing an N-X-T/S motif) is predicted for the 93 identified serum proteins. However, not all of these potential N-linked glycosylation sites were observed. Some of these potential N-linked glycosylation sites may not actually be occupied (Petrescu et al., Glycobiology 14:103-114 (2004)), or the peptides from certain sites may not be detectable by mass spectrometry, or protein digestion may be hindered by the protein post-translational modifications such as oligosaccharide attachment and/or disulfide bond formation. On the other hand, the number of peptides from each glycosylation site was increased due to other types of protein modifications (that is, methionine oxidation, protease processing) in the glycosylation region. It is expected that the same factors would also lead to an inflation of the number of peptides observed if digests of non-selected serum samples were analyzed. In the analyses of peptides generated from 5 μl of mouse serum using glycopeptide capture-and-release method, over 3000 peptide peaks were detected and quantified that were present at least at 2 of 3 samples in either group with intensity at least at 2-folds above background noise level. In MS/MS analysis, only a small fraction of peptides (319 unique peptides) were identified. This was due to the complexity of the sample and the fact that the mass spectrometer only had time to sequence a small portion of the peptides, predominantly the highly abundant peptides in each sample. The same under sampling factor was also the major cause of the inconsistency of protein identifications using LC-MS/MS. In this study, reproducible LC-MS was used for quantitative analyses, and this allowed analysis of all the peptide ions in each sample, including those from proteins of low abundance.

[0192] While the reduction of peptide redundancy is beneficial for achieving higher coverage of the proteome per analysis, it is also apparent that it leads to the loss of some, potentially important information. First, non-glycosylated proteins are transparent in this system. While it is believed that the majority of serum-specific proteins are in fact glycosylated (Durand and Seta, Clin. Chem. 46:795-805 (2000), intracellular proteins (typically non-glycosylated) that may represent a rich source of biomarkers if leaked into serum might go undetected. Second, the availability of fewer peptides per protein increases the challenge of identifying the corresponding protein. Third, this approach will reveal differences in protein level, or glycosylation level (glycosylation site occupancy). Disease markers that alter other protein post-translational modifications including proteolytic processing will not be detected on a glycopeptide level. Finally, collapsing peptides modified by different oligosaccharide structure into a single signal will obscure potential disease markers that are due to oligosaccharide structure alteration (Durand and Seta, Clin. Chem. 46:795-805 (2000).

[0193] In this study, the glycopeptide capture and LC-MS analysis platforms was used to differentiate serum from mice with chemically induced skin cancer from that of non-treated littermates. In this experiment, the mice with skin cancer and their untreated littermates had the same genetic background and lived in the same environment. The study therefore represents a controlled experiment with chemically induced skin cancer being the sole variable. The sera were clearly distinguished by numerous distinct peptides, the abundance of which was consistently increased or decreased between the cancer and control sera. While in this controlled experiment, the low number of samples was sufficient to detect disease-associated signatures, the application of the method to identification of potential biomarkers in much more variable human samples will require the analysis of a larger sample numbers in order to facilitate statistical validation of the data. The current method, at present, has sufficient throughput to perform studies involving a few hundred samples, a number that appears sufficient to generate statistically significant results within a reasonable time frame (Sullivan Pepe et al., J. Natl. Cancer Inst. 93:1054-1061 (2001); Adam et al., Cancer Res. 62:3609-3614 (2002)). By developing a robotic procedure to allow automated sample preparation, and by further optimizing LC-MS analysis procedures and the development of a robust, automated data analysis platform, the performance of the system can be further increased.

[0194] In contrast to the widely used SELDI-TOF and similar polypeptide profiling methods, the signals detected in the present method are defined molecular species, mostly peptides ranging in length between 7 and 30 amino acids. These peptides, if selected for CID in a tandem mass spectrometer, are readily sequenced. By adding the coordinates of selected discriminatory peptides to an inclusion list, several serum proteins were identified for which the abundance is increased in correlation with the chemical induction of skin cancer in mice (Table 4). While these proteins are indicators of interesting biology and have been reported to change the abundance in different types of cancer (Vejda et al., Mol. Cell. Proteomics 1:387-393 (2002), they are likely not markers for the specific diagnosis of skin cancer. Proteins useful for cancer detection, diagnosis or stratification might be proteins released in small amounts from the primary lesion, indicators of a specific response of the system to the lesion or other subtle changes in the serum proteome. For the reliable detection of such proteins or patterns of proteins, it is imperative that a large number of candidate molecules are identified, so that potential markers or signatures observed in different diseases, studies and laboratories can be validated, correlated and compared. This will allow the proteomics biomarker discovery community to establish defined molecular signatures as the currency of communication and to distinguish between true biomarkers and coincidental changes.

[0195] The identification of discriminatory peptides in this study furthermore indicates that at least some of the proteins changing in abundance in the skin cancer model are moderately to highly expressed. In contrast, serum cancer markers currently in clinical use have concentrations in the ng/ml range. Diamandis has argued that the SELDI-TOF method and by implication similar methods, are about 3 orders of magnitude too insensitive from the sensitivity required to detect such proteins (Diamandis, Mol. Cell. Proteomics 3:367-378 (2004)). The method presented here has the potential to reach ng/ml sensitivity levels and even lower concentration limits if high performance Fourier transform ion cyclotron resonance mass spectrometry (FTICR-MS) instruments are used. For example, at a concentration of 4 ng/ml, 5 μl of serum sample contains approximately 20 picogram (˜700 attomole) of PSA, an amount that is readily detected in a modern mass spectrometer. In comparison, if non-biased serum digests are analyzed on the same capillary LC-MS system, the total amount of serum that can be applied to the system would be 50 nl and therefore the concentration limit of detection would be 100 fold reduced, compared with the glycopeptide selected sample. Thus PSA would be well outside the detection limit of such an analysis. If further increases in the concentration limit of detection were required, the glycopeptide capture-and-release method could easily be combined with other peptide fractionation methods, including electophoresis (gel based or free flow electrophoresis) chromatography or affinity depletion.

[0196] In summary, selectively isolating peptides from N-linked glycosylated serum proteins has been found to be a powerful method for the analysis of the serum proteome. Together with the high reproducibility of this method, the high level of serum proteome coverage achieved at a moderate throughput suggests that this method will be most useful for the detection of proteins or protein patterns that distinguish individuals in different physiological states.

### EXAMPLE 3

### Development of High-throughput LC-MALDI MS/MS Method Using Stable Isotope-labeled Peptides for Biomarker Identification and Quantification

[0197] In the past few years MS-based proteomics as a “discovery science tool” has been quickly emerging into an informative quantitative technology for studying systems biology. Quantitative proteomics has demonstrated its potential applications in detection and quantification of diagnostic or prognostics disease markers and therapeutic proteins. The combination of off-line LC separation/spotting and MALDI MS/MS provides several conceptual advantages for such applications: more complete peptide coverage, the ability for repeat or multiple analysis on the same sample, selective MS/MS analysis based on MS information, high mass range, higher contamination tolerance, and easy to interpret data structure.

[0198] A straightforward, high-throughput screening technique was developed, which can be applied for clinical diagnostics, using LC-MALDI MS/MS combined with isotope-labeled peptide spiking. The isotope-labeled peptides were synthesized and spiked in the samples with appropriate concentration. The complex peptide mixture were separated and spotted on MALDI plates using HPLC/probot system (LC Packing). The spotted MALDI plate was analyzed in a MALDI TOF/TOF instrument (Applied Biosystems 4700 Proteomics Analyzer) in MS mode. The selected peptides were further analyzed in MS/MS mode for peptide/protein identification and confirmation. The CID fragmentation information of the peptides was searched against a human sequence database for peptide/protein identification and confirmation using a suite of software tools essentially as described in Examples 1 and 2. Quantification was achieved using the abundance ratio of the native peptide and the corresponding spiked peptide.

[0199] The isotope-labeled peptides were synthesized and characterized with HPLC and mass spectrometry. The elution properties of the isotope-labeled peptides and the effects of competitive ionization in a complex system were further evaluated by LC-MALDI TOF/TOF. The glycopeptides were captured from human serum proteins using hydrazide chemistry. The glycopeptide mixtures were spiked with isotope-labeled peptides and analyzed by LC-MALDI TOF/TOF. The study has demonstrated that the approach using LC-MALDI TOF/TOF and isotope-labeled peptide spiking can specifically target interesting peptide/protein identifications and quantification, therefore, significantly reducing the time intensive MS/MS analysis and database searching.

[0200] In these studies, a novel approach to facilitate the detection and quantification of specific proteins in a complex sample was developed. The highly selective, high throughput platform is built based on a MALDI TOF/TOF spectrometer and using stable isotope labeled peptides as internal standards. The detection and quantification of targeted proteins was accomplished using a complementary approach of specific mass matching, peptide sequencing and peptide quantification. The system demonstrated the capability to detect, selectively identify and quantify proteins of interest in a complex serum sample. These studies were extended and are described in more detail in Example 4.

### EXAMPLE 4

### High-throughput Proteome Screening for Biomarker Detection

[0201] This example describes the use of TOF-TOF analysis on an array as an example of qualitative and/or quantitative analysis of serum glycoproteins.

[0202] Preparation of formerly N-linked glycosylated peptides from serum. Serum glycoproteins in coupling buffer (100 mM NaAc and 150 mM NaCl, pH 5.5) were oxidized by adding 15 mM of sodium periodate at room temperature for 1 hour. After removal of sodium periodate, the sample was conjugated to the hydrazide resin at room temperature for 10-24 hours. Non-glycoproteins were then removed by washing the resin 6 times with an equal volume of urea solution (8M urea/0.4M NH₄HCO₃, pH 8.3). After the last wash and removal of the urea solution, the resin was diluted with 3 bed volumes of water. Trypsin was added at a concentration of 1 mg of trypsin/200 mg of serum protein and digested at 37° C. overnight. The peptides were reduced by adding 8 mM TCEP (PIERCE, Rockford, Ill.) at room temperature for 30 min, and alkylated by adding 10 mM iodoacetamide at room temperature for 30 min. The trypsin-released peptides were removed by washing the resin three times with 1.5 M NaCl, 80% Acetonitrile/0.1% trifluoroacetic acid (TFA), 100% methanol, and six times with 0.1 M NH₄HCO₃. N-linked glycopeptides were released from the resin by addition of peptide-N-glycosidase F (PNGase F) (at a concentration of 1 ml of PNGase F/40 mg of serum protein)(New England Biolabs; Beverly Mass.) overnight. The released peptides were dried and resuspended in 0.4% acetic acid for mass spectrometry analysis.

[0203] Synthesis of stable isotope labeled peptides. Fluorenylmethoxycarbonyl-derivatized phosphoamino acid monomers were from AnaSpec, Inc (San Jose, Calif.). Fmoc-derivatized stable-isotope monomers containing one ¹⁵N and five to nine ¹³C atoms were from Cambridge Isotope Laboratories (Andover, Mass.). Pre-loaded Wang resins were from Applied Biosystems. Synthesis scale was 5 μmol. Amino acids activated in situ with 1-H-benzotriazolium, 1-[bis(dimethylamino)methylene]-hexafluorophosphate(1-),3-oxide: 1-hydroxybenzotriazole hydrate were coupled at a 5-fold molar excess over peptide. Each coupling cycle was followed by capping with acetic anhydride to avoid accumulation of one-residue deletion peptide byproducts. After synthesis, peptide-resins were treated with a standard scavenger-containing trifluoroacetic acid-water cleavage solution, and the peptides were precipitated by addition to cold ether. Peptides were purified by reversed-phase C18 HPLC using standard TFA/acetonitrile gradients and characterized by matrix-assisted laser desorption ionization-time of flight (Biflex III, Bruker Daltonics, Billerica, Mass.) and ion-trap (ThermoFinnigan, LCQ DecaXP) MS.

[0204] LC/Probot fractionation and MALDI TOF/TOF analysis. The glycopeptide mixture was separated by reverse phase C18 column and spotted on a MALDI plate. The separation was performed using an Ultimate HPLC system (LC Packing/Dionex, Sunnyvale, Calif.) coupled with a Famos micro autosampler (LC Packing/Dionex, Sunnyvale, Calif.). A 100 minute gradient was used with liquid chromatography (LC) for peptide separation using a house packed C18 column. The eluent from the capillary column was mixed with the α-cyano-4-hydroxycinnapinic acid matrix solution (Agilent Technologies, Palo Alto, Calif.) in a mixing tee before spotting onto the MALDI plate. The matrix solution was delivered with a syringe pump. The fractions were automatically collected with 30 second intervals and spotted on a 192-well MALDI plate (Applied Biosystems, Foster City, Calif.) using a Probot Micro Fraction collector (LC Packing/Dionex, Sunnyvale, Calif.). The samples were analyzed by a MALDI TOF/TOF tandem mass spectrometer (ABI 4700 Proteomics Analyzer, Applied Biosystems, Foster City, Calif.). Both MS and MS/MS data were acquired with a Nd:YAG laser with 200 Hz sampling rate. For MS spectra, 1000 laser shots per spot were used. MS acquisition for the entire plates took 16 minutes with a total of 192000 laser shots per plate. MS/MS mode was operated with 1 KeV collision energy. The CID was performed using air as the collision gas. A typical 2000 laser shots was used for MS/MS acquisition. Both MS and MS/MS data were acquired using the instrument default calibration.

[0205] Database searching of MS/MS data. MS/MS data were searched against the human protein database from NCBI and a standard peptide database containing the spiked peptides. The mass tolerance of the precursor peptide was set at ±0.4 Daltons (Da), and the database search was set to expect the stable isotope labeling and the following modifications: carbonxymethylated cysteins, oxidized methionine and an enzyme-catalyzed conversion of asparagine to aspartic acid at the site of carbonhydrate attachment. No other constrains were include in the SEQUEST search. All of the MS/MS spectra were manually checked to verify the validity of the results.

[0206] Quantification. Binary files of MS survey scans were exported using 4700 Explorer software. Each file is corresponding to a single MS spectrum. The peak information, including spot number, mass and intensity, was extracted from the binary files and converted to text files. The individual files were then combined into a single text files, which contains the peak information from all the spots. The file was scanned for peptides that had been eluted across more than one sample spot. The signal intensities of these peptides from each adjacent spots were summed together to determine an accurate intensity over the entire peptide elution profile. The quantification of targeted peptides was achieved using the abundance ratio of a native peptide to the corresponding spiked stable isotope labeled peptide, which the amount is known. The quantification of each identified peptide was manually checked to verify the validity of the results.

[0207] The method used is schematically outlined in FIG. 10. It is conceptually simple and consists of two main steps, the production of ordered peptide arrays and their interrogation by MALDI-MS and MS/MS. For the production of ordered peptide arrays, protein samples (untagged proteins or proteins labeled with specific stable isotope tags) were subjected to tryptic digestion and combined with a cocktail of defined amounts of isotopically labeled reference peptides, each of which uniquely identified a particular protein or protein isoform (proteotypic peptides). The reference peptides were generated by chemical synthesis and contained heavy stable isotopes. The combined peptide mixture was separated by capillary reverse phase chromatography (PLC), and the eluting peptides are deposited on a sample MALDI plate to form an ordered peptide array in which each array element contains peptides that are derived from the digested sample proteins and/or from the cocktail of reference peptides. For the detection and quantification of the target polypeptides, that is, those proteins for which a reference peptide was added to the sample, the sample was analyzed using a matrix assisted laser desorption/ionization (MALDI) tandem time-of-flight (TOF-TOF) mass spectrometer that operated under a data-driven instrument control protocol, carrying out the following sequential steps A-C.

[0208] Step A) High speed MS scanning. MALDI-MS spectra were acquired from each array element, generating two types of signals, one representing the signals of the peptides for which no reference peptide was added, appearing as single peaks, and the other representing the signals for those peptides for which a reference peptide was added, appearing as paired signals with a mass difference that precisely corresponded to the mass differential encoded in the stable isotope tag. B) Peptide quantification. The signal intensities of the isotopically heavy and light forms of a signal pair were determined and used to calculate the absolute abundance of the peptide derived from the protein sample. As reverse-phase chromatography could split a specific pair of isotopic peptides across several consecutive spots on the MALDI plate, it was necessary to process the data prior to quantification. A specifically developed software tool scanned the MS data files for peptides (pairs) that eluted across more than one sample spot, summed the signal intensities of the corresponding signals from adjacent spots and used the integrated value for quantification, thus ensuring higher quantitative accuracy. C) Optional confirmation of peptide identity by MS/MS. In this method, proteins are primarily identified by correlating the array position and the accurately measured mass of each isotopically labeled peptide pair in the array with a list of added reference peptides with known mass. Optionally, peptide sequences could be confirmed by subjecting selected peptides to CID and sequence database searching of the resulting spectra (Eng et al., J. Am. Soc. Mass Spect. 5:976-989 (1994)).

[0209] To test the robustness of peptide identification reference peptides were added to a complex glycopeptide mixture extracted from human serum (Zhang et al., Nat. Biotechnol. 21:660-666 (2003))and spotted onto the sample plate under slightly different chromatography conditions. The plates were then analyzed and the peptides were identified in the sample mixture based on their accurate mass, the paired nature of the signal and the location on the peptide array. FIG. 11 shows the extracted ion trace over the chromatographic separation range for two consecutive runs. It is apparent that peptide LADLTQGEDQYYLR (1683.8 Da, derived from Clusterin precursor; SEQ ID NO:) was unambiguously identified in the complex background even though the targeted peptide pair was found in different spot positions in the two runs. The accurate mass, together with the paired nature of the signal, were sufficient for the identification of the target peptide. With increasing complexity of the analyzed sample, the chance that these criteria are insufficient for unambiguous peptide identification also increases. In these cases, peptide identities were confirmed by the fragment ion spectra of the precursors that are isobaric to the targeted peptide. An example of peptide confirmation by CID is illustrated in FIG. 12. Two peaks that corresponded to the mass of the stable isotope labeled reference peptide LHEITDETFR (1269.4 Da, from proteins similar to RIKEN cDNA 2610528G05 gene (Fragment); SEQ ID NO:) were detected within the mass search window. The expected signal was discriminated from the unexpected one based on the CID spectrum. The SEQUEST search results (Eng et al., supra, 1994) of the obtained spectra indicated that the precursor ion with higher intensity, eluting across spot 133 to spot 138, was the target peptide. Using this approach that limits the number of sequencing operations, the platform not only provided the high confidence for peptide identification, but also operated in a high throughput mode. For instance, with a laser sampling rate at 200 Hz available in the 4700 MALDI TOF/TOF instrument, a 192-well sample plate can be analyzed in less than 1 hour by MS scan of 192 spots followed by 200 MS/MS scans for selected peptide sequence validation.

[0210] To assess the performance of the system for rapid profiling of selected proteins in complex mixtures, N-glycoproteins were analyzed in human serum. The serum-derived peptides were generated from serum proteins by using a solid-phase glycopeptide capture and release method as described above (Zhang et al., Nat. Biotechnol. 21:660-666 (2003)). In brief, serum glycoproteins were immobilized on a solid phase via their glycostructure. Immobilized glycoproteins were trypsinized and the non-glycosylated peptides were washed to waste. The peptides that carried an N-linked carbohydrate on the native protein were isolated in their de-glyscosylated form using the enzyme PNGA'se F that cleaves between the carbohydrate and the peptide, converting the carbohydrate anchoring Asn into an Asp residue. The serum derived sample was added with a cocktail of iostopically labeled reference peptides. The composition of the reference peptide sample is summarized in Table 5.

TABLE 5

List of reference peptides labeled with heavy stable isotope.

Swiss-

| | |
|---|---|
| Prot/TrEMBL | Synthesized stable isotope |

| | | |
|---|---|---|
| accession No. | Protein annotation | labeled peptide sequences |

| | | |
|---|---|---|
| P03952 | Plasma kallikrein precursor | IVGGTDSSWGEWPWQVSLQ VK |
| P08185 | Corticosteroid-binding globulin precursor | AQLLQGLGFD LTER |
| P55058 | Phospholipid transfer protein precursor | IYSDHSALESLALIPLQAP LK |
| P10909 | Clusterin precursor | LADLTQGEDQYY LR |
| P51884 | Lumican precursor | LGSFEGLVDLTFIH LQHNR |
| P19652 | Alpha-1-acid glycoprotein 2 precursor | SVQEIQATFFYFTPDKTEDTIF LR |
| P02750 | Leucine-rich alpha-2-glycoprotein precursor | LPPGLLADFTL LR |
| Q9H4M1 | Glycosylphosphatidylinositol-specific | FHDVSESTHWTPFLDAS VHYIR |
| | phospholipase D precursor, Phosphatidylinositol- | |
| | glycan-specific phospholipase D 1 precursor | |
| P04004 | Vitronectin precursor | DGSLFA FR |
| P04004 | Vitronectin precursor | DNATVHEQVGGPSLTSD LQAQS |
| | | K |
| NA | Prenylcysteine lyase precursor | GELDTSI FSSR |
| Q9UK55 | Protein Z-dependent protease inhibitor precursor | LPYQGDATmLVV LmEK |
| P04180 | Phosphatidylcholine-sterol acyltransferase | mAWPEDHVFISTPS FDYTGR |
| | precursor | |
| Q13201 | Endothelial cell multimerin precursor | FNPGAESVVLSDST LK |
| P40197 | Platelet glycoprotein V precursor | ISALGLPTDLTHILL FGmGR |
| Q04756 | Hepatocyte growth factor activator precursor | CFLGDGTG YR |
| P41222 | Prostaglandin-H2 D-isomerase precursor | SVVAPATDGGLDLTSTF LR |
| P41222 | Prostaglandin-H2 D-isomerase precursor | WFSAGLASDSSW LR |
| P11597 | Cholesteryl ester transfer protein precursor | GHFIYKDVSEDLPLPTFSPTL LGD |
| | | SR |
| P33151 | Vascular endothelial-cadherin precursor | EVYPWYDLT VEAK |
| P02786 | Transferrin receptor protein 1 | KDFEDLYTPVDGSIVI VR |
| P04278 | Sex hormone-binding globulin precursor | LDVDQA LDR |
| P06681 | Complement C2 precursor | TmFPDLTD VR |
| Q96KN2 | Glutamate carboxypeptidase-like protein 2 | LVPHmDVSA VEK |
| | precursor | |
| Q9UGM5 | Fetuin-B precursor | GCDDSDVLAVAGFA LR |
| Q9UGM5 | Fetuin-B precursor | VLYLAAYDCTLRP VSK |
| P06276 | Cholinesterase precursor | DDYTKAEEILSR |
| P07333 | Macrophage colony stimulating factor I receptor | HTDYSFSPWHGFTIHR |
| | precursor | |
| P03952 | Plasma kallikrein precursor | LQAPLDYTEFQKPICLPSK |
| P05156 | Complement factor I precursor | DGTAVCATNR |
| P04114 | Apolipoprotein B-100 precursor | YDFDSSmLYSTAK |
| P80188 | Neutrophil gelatinase-associated lipocalin | SYDVTSVLFR |
| | precursor | |
| P54289 | Dihydropyridine-sensitive L-type, calcium | IDVNSWIEDFTK |
| | channel alpha-2/delta subunits precursor | |
| P40225 | Megakaryocyte stimulating factor | DGTLVAFR |
| Q13876 | Quiescin, Bone-derived growth factor (Fragment) | DGSGAVFPVAGADVQTLR |
| Q16769 | Glutaminyl-peptide cyclotransferase precursor | NYHQPAILDSSALR |
| P40189 | Interleukin-6 receptor beta chain precursor | ETHLETDFTLK |
| NA | Nectin-like protein 2, Hypothetical protein | FQLLDFSSSELK |
| | HEMBA 1001879 | |
| NA | hypothetical protein XP_174441 | SHAASDAPEDLTLLAETADAR |
| P13473 | lysosomal-associated membrane protein 2 | IAVQFGPGFSWIADFTK |
| | precursor, Lysosome-associated membrane | |
| | glycoprotein 2 precursor | |
| P13473 | lysosomal-associated membrane protein 2 | WQMDFTVR |
| | precursor, Lysosome-associated membrane | |
| | glycoprotein 2 precursor | |
| Q96CX1 | Similar to RIKEN cDNA 2610528G05 gene | LHEITDETFR |
| | (Fragment) | |
| Q07954 | Low-density lipoprotein receptor related protein | FDSTEYQVVTR |
| | 1 precursor | |
| P01009, | Alpha-1-antitrypsin precursor | QLAHQSDSTNIFFSPVSIATAFAmL |
| | | SLGTK |
| Q86SU4, | Similar to RIKEN cDNA 1300018K11 gene | QGSLGLQYDASQEWDLR |
| Q8N5V4 | (Fragment) | |
| Q16853 | Membrane copper amineoxidase | IQmLSFAGEPLPQDSSmAR |
| P23470 | Protein-tyrosine phosphatase gamma precursor | SDFSQTmLFQADTTR |
| P01033 | Metalloproteinase inhibitor 1 precursor | FVGTPEVDQTTLYQR |
| Q92859 | Neogenin precursor | TLSDVPSAAPQDLSLEVR |

[0211] The combined sample was separated by capillary reverse phase chromatography and spotted onto the sample plate in 192 spots and analyzed by MALDI-MS. Results from this analysis are shown in FIG. 13. FIG. 13A shows the base peak display of the detected peptides, indicating that peptides were detected over the whole separation range, with the majority of peptide signals concentrated between fractions 45 and 165. FIG. 13B shows the mass spectrum of a representative spot, indicating the complexity of the sample analyzed. In total, more than 2500 unique precursor ions were detected in MS mode. To identify and quantify the target peptides, the computer driven selective peptide analysis method described above was used. FIG. 14 indicates that the added reference peptides could be detected and identified over a broad range of the chromatographic separation range in a very complex sample. FIG. 14A shows the number of precursor ions detected in each spot in MS mode; and FIG. 14B shows the distribution of spike-in peptides over the chromatographic separation range. The distribution profile of the spike-in peptides were extracted from the very complex background.

[0212] FIG. 15 shows that the peptides could be identified and quantified even though they represented relatively minor peaks in a complex spectrum. Data for peptide FDSTEYQVVTR (SEQ ID NO:), which was derived from low-density lipoprotein receptor-related protein 1 precursor and ¹³C labeled on residue valine 9, are shown. Using the specific mass matching to search the MS data, the spot (or spots) containing the peptide pairs was located. By examining the MS spectrum, the paired peaks (spiked and native) were identified. The mass of the spike-in peptide and native peptide were 1349.6 Da and 1344.6 Da, respectively. The identification of the peptides was further confirmed by MS/MS analysis and sequence database searching. Since the amount of the spike-in peptide was known, the concentration of the native peptide could be calculated based on the signal intensity ratio of the paired peptide signals. Consequently, the identification and quantification of the related proteins in a complex serum sample was accomplished. The concentration of the protein in a serum sample can be calculated according to equation 1:

$$C = \frac{( {A}_{n} / {A}_{s} ) * {M}_{s}}{{V}_{a}} * ( {V}_{b} / V ) \qquad Equation 1$$

where Aₙ and Aₛ are the integrated peak area of the native and spike-in peptide in the MS spectrum, respectively. Mₛ is the amount of stable isotope labeled peptide spiked in the glycolpeptide mixture. Vₐ is the volume of the glycopeptide mixture used for MALDI TOF/TOF analysis. V_{b} is the total volume of the glycopeptide mixture extracted from the serum sample. V is the total volume of the serum used for glycoprotein extraction. It is important to note that the accuracy of the result estimated from the above formula depends on many factors, including data processing, sample purification, and glycopeptide extraction efficiency, and these factors can be readily determined.

[0213] To demonstrate the capacity of the system to rapidly and quantitatively profile selected serum proteins, isolates from four human serum samples using the glycopeptide capture and release method described above were spiked with reference peptides and analyzed by offline LC-MALDI TOF/TOF platform. The proteins and the corresponding signature peptides for which both spike-in and native signals are detected by the platform are listed in Table 6. The results are presented in the form of a peptide map in FIG. 16. The x axis represents the mass of the targeted native peptides and the y axis indicates the abundance ratio of a native peptide to the corresponding isotope-labeled peptide, providing the quantitative information describing the corresponding protein. The result demonstrates that even in very complex samples with an enormous number of proteins that may fluctuate within a population, the key elements that indicate the state of a specific biological condition can be effectively extracted and expressed quantitatively by this approach.

TABLE 6

List of proteins and the corresponding signature peptides
used in FIG. 16.

Mass

| | | |
|---|---|---|
| Protein | Peptide sequence | (m/z) |

| | | |
|---|---|---|
| Apolipoprotein B-100 precursor | YDFN*SSM#LYSTAK | 1542.7 |
| Corticosteroid-binding globulin precursor | AQLLQGLGFN* LTER | 1559.8 |
| Endothelial cell multimerin precursor | FNPGAESVVLSN*ST LK | 1662.9 |
| Clusterin precursor | LAN*LTQGEDQYY LR | 1683.8 |
| Neogenin precursor | TLSDVPSAAPQN*LSLE VR | 1897.1 |
| Transferrin receptor protein 1 | KDFEDLYTPVN*GSIVI VR | 2065.4 |
| Lumican precursor | LGSFEGLVN*LTFIH LQHNR | 2195.5 |
| Phospholipid transfer protein precursor | IYSN*HSALESLALIPLQAP LK | 2278.7 |
| Vitronectin precursor | N*NATVHEQVGGPSLTSD LQAQSK | 2381.5 |

*enzyme-catalyzed conversion of asparagine to aspartic acid at the site of carbonhydrate attachment.
#methionnine oxidation.
amino acid labeled with ¹⁵N and ¹³C.

[0214] These results demonstrate a method for proteome screening and an experimental platform that supports the method. The method has the potential to reach very high throughput because the redundancy common to LC-MS/MS based proteomics experiments is eliminated and the analysis is focused on specific, information rich analytes. The offline LC-MALDI TOF/TOF based platform provides several advantages for such an approach. These advantages include more complete peptide coverage, low redundancy, the option to perform repeated or multiple analyses on the same sample, high mass range and accuracy, selective MS/MS analysis based on MS information, higher contamination tolerance, and easy to interpret data structure. The generation of predominantly singly charged peptides by MALDI simplifies the quantitative analysis. Global identification can be performed on the same MALDI plate afterwards, if the information is needed. The ability to reexamine and verify the same sample set can be very beneficial for quantitative applications.

[0215] It noteworthy that not all of the spike-in peptides behaved the same in a complex sample. In selection of reference peptides, criteria, such as biological significance, sensitivity for mass analysis, good mass range, and without potential mass overlap with other peptides, and the like, need to be satisfied. The development of proteome-screening technology indicates an important transition of quantitative proteomics from a sole discovery mode into a multi-phase technology. The implementation of the browsing/screening mode allows the utilization of the extensive genomic and proteomic knowledge that has been accumulated by biology and medicine, and focus on analyzing the key elements that uniquely represent a specific biological condition, as was demonstrated in this study. Technically, since the identification and quantification of targeted proteins is based on searching and identifying the corresponding signature peptide pairs directly, the approach significantly reduces sample complexity, therefore improving the throughput and identification confidence. It provides a greater analytical dynamic range and facilitates the detection of low abundance proteins. The ability to describe specific protein patterns associated with certain biological conditions within a complex background in an absolute quantitative way provides the feasibility for data standardization. The proteome-screening technology described in this example opens new opportunities for quantitative proteomic analysis and can be developed into a high throughput technology for clinical diagnostic at proteome level.

### EXAMPLE 5

### Identification of Serum Glycoproteins

[0216] Thousands of N-linked glycosylation sites have been isolated and identified using the methods described above. Sixty peptides have been synthesized according to the identified N-linked glycosylation sites, and one N-linked glycopeptide with heavy isotope labeling was spiked to human sera of different persons to quantify the abundance of the glycopeptide. Table 7 shows the N-linked glycosylation sites of glycopeptides (SEQ ID NOS: 1-3244) identified from human serum/plasma using the above-described methods. Table 8 shows N-linked glycopeptides (SEQ ID NOS: 3245-3369) identified from human serum/plasma using the above-described methods and which do not contain the consensus (N-X-T/S) glycosylation motif. Asparagines modified in the peptide sequence are marked (*).

TABLE 7

N-linked glycosylation sites identified from human serum/plasma.

| | |
|---|---|
| Protein IPI # | Peptide |

| | | |
|---|---|---|
| (VERSION 2.28) | Identified Peptide Sequences | Probability |

| | | |
|---|---|---|
| IPI00000001 | R.EFVMQVKVGN#HTAEGTGTNK.K | 0.7332 |
| IPI00000013 | Y.RPENSVAN#DTGFTVVAPGKEK.A | 0.6348 |
| IPI00000070 | M.SDEVGCVN#VTLCEGPNK.F | 0.6201 |
| IPI00000075 | R.LASPPSQGEVPPGPLPEAVLALYN#STR.D | 0.9994 |
| IPI00000087 | K.QFSLN#WTYQECNN#CSEEMFLQFR.M | 0.6626 |
| IPI00000124 | R.N#LSFLDLCFTTSIIPQM*L.V | 0.55 |
| IPI00000137 | K.YEFCPFHN#VTQHEQTFR.W | 1 |
| IPI00000151 | R.SEVELEVLGDTEGLN#LSFTAI.C | 0.8574 |
| IPI00000160 | R.N#SSSSGSSGAGQK.R | 0.7791 |
| IPI00000213 | M.GAAVTLKN#LTGLNQRR.- | 0.9553 |
| IPI00000213 | R.AM*LAAIYN#TTELVMM*QDSSPDFED.T | 0.7446 |
| IPI00000321 | E.RLASSN#SSQSLAPLMMEVPMLSSLGVTNSK.S | 0.7342 |
| IPI00000330 | R.KMAAN#SSGQGFQNK.N | 0.9623 |
| IPI00000330 | L.M*QN#QSSTNHPGASIALSRPSLNKDFR.D | 0.7219 |
| IPI00000352 | L.DTCPSSSTASSISSSGGSSGSSSDN#RTYR.Y | 0.6171 |
| IPI00000375 | Q.RNAENTKSN#VTH.K | 1 |
| IPI00000458 | K.NNYGLLLNEN#ESLFLM*VVLWK.I | 0.9232 |
| IPI00000691 | K.VFDSLLN#LSSTLQATR.A | 0.9897 |
| IPI00000758 | I.N#STLKGRWR.V | 0.514 |
| IPI00000764 | R.AQPLINLQMVN#ASLYEHVER.M | 0.5611 |
| IPI00000775 | R.NN#ISKLTDGAFWGLSKMHVLH.L | 0.5702 |
| IPI00000792 | K.GIDIIIEMLANVN#LSKDL.S | 0.6397 |
| IPI00000812 | S.MISNMN#ASR.A | 0.5828 |
| IPI00000828 | M.KKDAEEDDSLAN#SSDLLKELLETGDNR.E | 0.6778 |
| IPI00000837 | R.AN#ASFTWVASDGWGAQESIIK.G | 0.5568 |
| IPI00000839 | R.NVN#FSGIAGNPVTFNENGDAPGR.Y | 0.7319 |
| IPI00000845 | R.ENALNNLDPNTELN#VSR.L | 0.9806 |
| IPI00000877 | R.KDIN#TTAQ.N | 0.7877 |
| IPI00000877 | R.LSALDNLLN#HSSM*FLK.G | 0.9941 |
| IPI00000877 | K.VIN#ETWAWK.N | 0.9549 |
| IPI00000899 | M.VDKYIPN#ISM*CLKDSDPFIR.K | 0.6638 |
| IPI00001091 | K.RGRGNFGGQSEQENTLNQLLVEMDGFN#T.T | 0.6573 |
| IPI00001120 | L.TSLSVTNTN#LSTVPFLAFK.H | 0.7904 |
| IPI00001120 | R.VLN#VSQNLLET.L | 0.9643 |
| IPI00001120 | K.LVPLGVFTGLSN#LTK.L | 0.7469 |
| IPI00001152 | S.YQPWGNVPDAN#YTSDEEEEK.Q | 0.6651 |
| IPI00001451 | S.EEN#STFR.N | 0.8398 |
| IPI00001458 | K.LFKEVASLQENFEVFLSFEDYSN#SSLVADLR.E | 0.9428 |
| IPI00001461 | G.FVN#STM*EEAGLCGLREK.A | 0.6389 |
| IPI00001497 | E.NAPN#GTLVVTVN#ATDLDEGVNK.D | 0.5032 |
| IPI00001510 | K.EKGN#STTDNSDQ.- | 0.723 |
| IPI00001522 | A.SSFKGYIEN#CSTPNTYICMQR.T | 0.5919 |
| IPI00001586 | K.KAADTAVGWALGYM*LN#LTNLIPADPPGLR.K | 0.9623 |
| IPI00001592 | R.VSVNTAN#VTLGPQLM*EVTVYRR.H | 0.9272 |
| IPI00001592 | K.NDRN#SSDETFLKDLPIMFD.V | 0.6647 |
| IPI00001593 | K.NGGSILFYTGNEGDIIWFCN#NTGFM*WDVAEELK.A | 0.6036 |
| IPI00001651 | Y.KPLN#DSVRAQYSNWLLAGNLALSPTGNAKK.P | 0.7263 |
| IPI00001654 | K.KMNMM*N#RSYN#VTLKR.Q | 0.7934 |
| IPI00001662 | K.GRM*STLTFFN#VSEK.D | 0.7988 |
| IPI00001672 | K.KSLELNPN#NSTAM*LR.K | 0.7527 |
| IPI00001759 | K.IN#STADLDFIQQAISYSSFPFWM*GLSRR.N | 0.8974 |
| IPI00001866 | R.GSDDGDGESFN#GSPTGSIN#LSL.D | 0.6138 |
| IPI00001872 | R.ETVPEYN#LSITAR.D | 0.5406 |
| IPI00002054 | K.GTVLPVATIQN#ASTAM*LM*AASVAR.K | 0.5668 |
| IPI00002070 | K.TLEELHLTGN#LSAENNR.Y | 0.6831 |
| IPI00002103 | M.TVKVDGVAQDGTTMYIHNKVHN#RTR.T | 0.7155 |
| IPI00002159 | R.KFSFYGN#LSPRR.S | 0.6247 |
| IPI00002159 | K.SCSSHSSSNTLSSN#TSSNSDDK.H | 0.7344 |
| IPI00002185 | K.N#WSALLTAVVIILTIAGNILVIM*AVSLEKK.L | 0.6377 |
| IPI00002197 | K.FLMSN#ETVLLAKHNIFTLALMIV.N | 0.9243 |
| IPI00002224 | R.RGDN#DSHQGDLEPILEASVLSSHHK.K | 0.6188 |
| IPI00002232 | K.LRKEQLKEELNEN#QSTPKKEK.Q | 0.5897 |
| IPI00002251 | R.VPPTLN#SSPCGGFTLCK.A | 0.5889 |
| IPI00002272 | R.KKVTAQN#LSDGDIKLLVNIVRAYDIPVR.K | 0.6856 |
| IPI00002283 | R.ETPPLEDLAAN#QSEDPRNQRLSK.N | 0.807 |
| IPI00002283 | K.NGRYQPSIPPHAAVAAN#QSRARR.G | 0.8881 |
| IPI00002293 | K.CGSAYEPEN#QSK.D | 0.5995 |
| IPI00002320 | K.EEFVIHTIFPPNGM*NLYKNN#HSESSSN#R.S | 0.8932 |
| IPI00002335 | M.NSEFN#LSLLAPCLSLGMSEISGGQK.S | 0.6653 |
| IPI00002354 | R.AFDMLSECGFHMVACN#SSVTASFINQYT.D | 0.6123 |
| IPI00002366 | -.MSTLSN#FTQTLEDVFR.R | 0.5344 |
| IPI00002374 | K.TNLDDDVPILLFESN#GSLIYTPTIEIN#SSHHSAMEK.R | 0.63 |
| IPI00002526 | A.N#ASGYM*YETSYR.R | 0.6113 |
| IPI00002541 | K.AFN#STLPTMAQMEK.A | 0.8872 |
| IPI00002547 | R.LFCDPTFLPEN#DSLFYNRLLPGK.V | 0.7198 |
| IPI00002580 | K.YEIYLN#SSLVQFLLS.R | 0.7748 |
| IPI00002632 | K.RNHM*LLLYPREILILDLEVN#QTVGVIAIERTGV.P | 0.5125 |
| IPI00002647 | K.LLKGDIDIGSQN#GTDLFGFGNTHEYPDLQMIL.S | 0.8714 |
| IPI00002666 | N.GPDTNHQNPQN#KTSPFSVSPTGPSTK.I | 0.6038 |
| IPI00002689 | K.AQHEFTEFVGATM*FGTYNVISLVVLLNMLIAMMN#NS.Y | 0.5671 |
| IPI00002707 | K.TN#RTNKPSTPTTATRKKKDLKNFR.N | 0.6502 |
| IPI00002707 | R.NVDSNLANLIMNEIVDN#GTAVK.F | 0.6768 |
| IPI00002790 | K.M*YSEGSDIVPQSN#ETALHYFK.K | 0.5645 |
| IPI00002806 | -.M*NQFGPSALIN#LSN#FSSIKPEPASTPPQGSM*AN.S | 0.9191 |
| IPI00002816 | F.KNFVITYN#RTYESKEEARWR.L | 0.7172 |
| IPI00002876 | H.SFLVHLIGLLVWQCDISVSPVAAIVTDIFN#TSDGGR.F | 0.6888 |
| IPI00002984 | K.NPELSGSLMTLSN#VSCLSNTPARK.I | 0.5173 |
| IPI00003048 | P.DN#ASGCGEQINYGR.V | 0.9521 |
| IPI00003057 | R.DVNICN#MTSHLPAAASAS.P | 0.8908 |
| IPI00003096 | R.RLSLSQSITDDDLEAIAN#DSEEEIIKPR.S | 0.5042 |
| IPI00003323 | K.TSKSEENSAGIPEDN#GSQRIEDTQK.L | 0.9714 |
| IPI00003323 | K.SDSSKSESDSSDSDSKSDSSDSN#SSDSSDNS.D | 0.957 |
| IPI00003325 | R.DLAELKSSLVN#ESEGAAGSAGIPGVPGAGAGAR.G | 0.5809 |
| IPI00003351 | K.HIPGLIHN#MTAR.C | 0.9991 |
| IPI00003365 | R.KVHLM*GYNCN#ATTK.C | 0.9023 |
| IPI00003370 | K.SIEQSIEQEEGLN#RSSADLR.I | 0.7622 |
| IPI00003384 | R.N#LSVDGKNVDMAGFIANN#GTREG.C | 0.6318 |
| IPI00003451 | R.FSSFVPVTIPHATTAN#TSV.L | 0.6909 |
| IPI00003478 | K.CEFLANLHITALLN#VSRR.T | 0.5036 |
| IPI00003480 | K.DIDVSPKHVGFATIPRN#YTMSFLPR.- | 0.6035 |
| IPI00003515 | K.AKSDQLLSSNEN#FTNK.V | 0.8642 |
| IPI00003515 | K.N#ISLTKQIDQLSK.D | 0.6204 |
| IPI00003515 | K.LM*SLAN#SSEGKVDKVLM*R.N | 0.6075 |
| IPI00003562 | K.TEPMDADDSNN#CT.G | 0.5459 |
| IPI00003590 | K.N#GSGAVFPVAGADVQTLR.E | 0.9966 |
| IPI00003706 | K.KPYVSLAQQMAPPSPSN#STPN#SSSGSNGNDQLSK.T | 0.6332 |
| IPI00003834 | R.DAGGELAN#LSQAELVDLVQWTDLILFDYLTANFDR.L | 0.8774 |
| IPI00003897 | R.DHGSPTLSAN#VSLRVLVGDRNDNAPR.V | 0.9405 |
| IPI00003919 | K.NYHQPAILN#SSALR.Q | 0.9994 |
| IPI00003932 | T.N#CTTEASMAIRPK.T | 0.5913 |
| IPI00003965 | K.VLKN#SSLAEFVQSLSQTM*GFPQDQIR.L | 0.6703 |
| IPI00004022 | T.N#QTPPTYN#KTNK.F | 0.8329 |
| IPI00004022 | R.IDDLQM*VLN#QTEDHRQR.V | 0.9878 |
| IPI00004047 | K.M*PGDIKNWVDAHM*NCEDIAMNFLVAN#VTGK.A | 0.5867 |
| IPI00004047 | K.CTN#LSEGVLSVRK.R | 0.783 |
| IPI00004067 | K.SPDTFM*IPM*ALPNDN#GSVSG.V | 0.7678 |
| IPI00004084 | K.MSLVM*PAM*APN#ETLSGR.G | 0.5375 |
| IPI00004121 | R.YDGAVQVMATQDGAN#FTAARQGYR.R | 0.6451 |
| IPI00004237 | K.TNQGIPELN#ASSVGM*AK.A | 0.7276 |
| IPI00004247 | R.CSAEEATEGLM*N#LSPSAM*K.N | 0.5785 |
| IPI00004362 | S.LPSWKSLLNVPMEDVN#LSSGHIAR.V | 0.6084 |
| IPI00004368 | -.MAHSQNSLELPININ#ATQITTAYGHR.A | 0.7548 |
| IPI00004388 | K.EN#NTGYIN#ASHIK.V | 0.5666 |
| IPI00004399 | E.FKNNFLNIDPITMAYSLN#SSAQER.L | 0.8111 |
| IPI00004413 | R.ECTCPPGMFQSN#ATCAPHTVCPVGWGVRKK.G | 0.545 |
| IPI00004416 | L.KSN#NSM*AQ.A | 0.5174 |
| IPI00004457 | R.IQM*LSFAGEPLPQN#SSM*AR.G | 1 |
| IPI00004457 | R.KEEEPSSSSVFNQNDPWAPTVDFSDFINN#ETIAGK.D | 0.999 |
| IPI00004462 | R.GGLN#LTAVTVAAENN#HTVAFLGTSDGRILK.V | 0.6774 |
| IPI00004462 | R.EAESLQPM*TVVGTDYVFHN#DTK.V | 0.9936 |
| IPI00004462 | R.SFASGGRSIN#VTGQGFSLIQR.F | 0.8388 |
| IPI00004480 | K.EHAVFTSNQEEQDPAN#HTCGVK.S | 0.9335 |
| IPI00004494 | F.GLFN#TTSNIFR.G | 0.734 |
| IPI00004503 | M.FMVKNGN#GTACIM*AN#FSAAFSVNYDTK.S | 0.9952 |
| IPI00004503 | R.GHTLTLN#FTR.N | 0.9941 |
| IPI00004527 | K.GVSFN#ESAADNLK.L | 0.7928 |
| IPI00004529 | R.IDWDDDKYYN#TSLETR.L | 0.9999 |
| IPI00004534 | K.FCDN#SSAIQGKEVRFLR.P | 0.5374 |
| IPI00004557 | M.SN#YSSSSLLSGAGK.D | 0.7134 |
| IPI00004560 | T.KNVNPN#WSVNVK.T | 0.5555 |
| IPI00004560 | K.IKKHFNTGPKPN#STAAGVSVIATTALDK.E | 0.9054 |
| IPI00004565 | -.M*ALNN#VSLSSGDQRSR.V | 0.8782 |
| IPI00004573 | R.AN#LTNFPEN#GTFVVNIAQLSQDDSGR.Y | 0.9994 |
| IPI00004573 | K.VPGN#VTAVLGETLK.V | 1 |
| IPI00004573 | R.LSLLEEPGN#GTFTVILNQLTSR.D | 1 |
| IPI00004573 | K.WN#NTGCQALPSQDEGPSK.A | 0.99 |
| IPI00004576 | M.PVSSSSPLSSLTFNAINRYTN#TSK.T | 0.6661 |
| IPI00004617 | R.EQQFN#STFR.V | 1 |
| IPI00004618 | R.EEQFN#STYR.V | 1 |
| IPI00004641 | W.SESGQN#VTAR.N | 0.7299 |
| IPI00004641 | K.TPLTAN#ITK.S | 1 |
| IPI00004641 | K.HYTN#PSQDVTVPCPVPPPPPCCHPR.L | 1 |
| IPI00004641 | R.LSLHRPALEDLLLGSEAN#LTCTLTGLR.D | 1 |
| IPI00004641 | R.LAGKPTHVN#VSVVMAEVDGTCY.- | 1 |
| IPI00004670 | R.IAEN#YTAVVSPDIASIDLNTFEFNK.P | 0.5166 |
| IPI00004671 | K.KNADN#NSSAFTALSEER.D | 0.6348 |
| IPI00004712 | K.SVVEKM*KN#ISNHLVIEANLDGELNLK.I | 0.5179 |
| IPI00004758 | K.VSPRGIILTDN#LTNQLIEN#VSIYR.I | 0.98 |
| IPI00004758 | K.APLSTVSAN#TTNMDEVPRP.Q | 0.9034 |
| IPI00004901 | T.ANSQVM*GSAN#STLR.A | 0.8959 |
| IPI00004931 | R.YN#VSQQALDLQNLR.F | 0.7112 |
| IPI00004957 | R.IDGSQNFN#ETWENYK.Y | 0.9995 |
| IPI00004957 | K.NEEVKN#M*SLELNSK.L | 0.9674 |
| IPI00004970 | C.FYNLELGDM*SLSDN#ASMCLM*SIIK.K | 0.5294 |
| IPI00004977 | R.DGVLLCQLLHN#LSPGSIDLK.D | 0.9554 |
| IPI00005037 | K.TN#VTHEEHTAVEK.I | 0.5072 |
| IPI00005084 | I.WEKAN#LTLPR.G | 0.5219 |
| IPI00005089 | K.VN#KTLTSLNIESNFITGTGILALVEALK.E | 0.6373 |
| IPI00005101 | K.KN#ITYYDSM*GGINNEACR.I | 0.7313 |
| IPI00005107 | K.DGYDLVQELCPGFFFGN#VSLCCDVR.Q | 0.5078 |
| IPI00005118 | R.RQAVELNVVAIVN#DTVG.T | 0.8452 |
| IPI00005118 | R.RQGAYNIDVVAVVN#DTVGTMM.G | 0.8535 |
| IPI00005146 | K.LN#VSDLYKLTDTVAIR.E | 0.8929 |
| IPI00005188 | S.VGAAPN#ASDGLAHSGK.V | 0.5798 |
| IPI00005258 | K.YEYLMTLHGVVN#ESTVCLM*GHER.R | 0.8617 |
| IPI00005264 | K.ANGLLDFDIFYN#VTGCLRN#MSSAGADGRK.A | 0.9686 |
| IPI00005270 | M.M*SVQANTGPPWESKN#STAVWR.G | 0.7247 |
| IPI00005439 | R.VLYLAAYN#CTLRPVSK.K | 1 |
| IPI00005439 | R.GCN#DSDVLAVAGFALR.D | 1 |
| IPI00005485 | K.GPGEVIPGGN#HSLYSLK.G | 0.5225 |
| IPI00005512 | K.EFYLTPNSPAEMLHN#VTLALELLK.D | 0.5241 |
| IPI00005543 | K.N#WTFGPQDVDELIFMLSDSPGVMCR.P | 0.7216 |
| IPI00005549 | K.EDGSGSAYDKESM*AIIKLN#NTTVLYLK.E | 0.8451 |
| IPI00005565 | T.ILLDAHEAGSAEN#DTADAEPPK.I | 0.8401 |
| IPI00005607 | R.LQNSQCYN#WTLLLGNR.W | 0.9011 |
| IPI00005613 | Q.N#SSQSADGLR.C | 0.5344 |
| IPI00005638 | R.LAM*AYGLN#VSFLER.L | 0.7107 |
| IPI00005667 | R.EFSAGTVYPETN#KTK.N | 0.7715 |
| IPI00005675 | K.HWTNFVITENANDAIGILN#NSASFNK.M | 0.5914 |
| IPI00005683 | K.ALWNLRSN#DTGLLGNVVNIQTGHWVGK.Q | 0.5878 |
| IPI00005683 | M.GN#SSEFQKAVKLVINTVSFDK.D | 0.7686 |
| IPI00005700 | K.KTLDEERN#SSSRSGITGTTNK.K | 0.702 |
| IPI00005704 | A.LCDQEGWDTPIN#YSK.T | 0.839 |
| IPI00005704 | K.GAEIEVDEN#GTLDLSMKK.N | 0.5705 |
| IPI00005750 | M.TGVADN#GSVLEITPDVAEVYLVRK.N | 0.8014 |
| IPI00005791 | K.ELLN#ETEEEINKALNK.K | 0.7699 |
| IPI00005792 | K.QMN#MSPPPGNAGPVIM.S | 0.6751 |
| IPI00005808 | M.LAQEGM*LANLVEQN#ISVRR.R | 0.6502 |
| IPI00005826 | K.SLN#VSSSVNQASR.L | 0.657 |
| IPI00005858 | G.FDEDM*VIQALQKTNN#RSIEAAIEFISK.M | 0.9909 |
| IPI00005858 | R.REQMAAAAARPIN#ASMKPGNVQQSVNR.K | 0.7193 |
| IPI00005858 | R.QPPPPYPLTAANGQSPSALQTGGSAAPSSYTN#GSIP.Q | 0.5362 |
| IPI00006011 | K.N#LSCTNVLQSN#STK.K | 0.9003 |
| IPI00006011 | R.M*KSDSFLQEMPN#VTN.I | 0.7042 |
| IPI00006011 | R.NCQAIQQN#HSCSK.S | 0.6602 |
| IPI00006035 | R.LPLAN#MSYYVSPQAVDAVHRGLGLPLPR.T | 0.908 |
| IPI00006038 | R.ALSMYEEAFQN#TSDSDR.Y | 0.5732 |
| IPI00006038 | K.ITNEKGECIVSDFTIGRKGYGSIYFEGDVN#LT.N | 0.6621 |
| IPI00006065 | M.RPRGQPADIRQQPGM*M*PHGQLTTIN#QSQLSAQLG.L | 0.5097 |
| IPI00006079 | Q.KFN#DSEGDDTEETEDYRQFRK.S | 0.5259 |
| IPI00006093 | K.VVNPQEYSSN#CTEPFPN#STNLLPT.E | 0.6183 |
| IPI00006096 | S.LN#GTSRGSSDLTSAR.N | 0.9003 |
| IPI00006096 | K.LQTTN#TTRSVLK.D | 0.8793 |
| IPI00006097 | Q.PQAVPPYASEN#QTCR.D | 0.7754 |
| IPI00006114 | K.VTQN#LTLIEESLTSEFIHDIDR.E | 1 |
| IPI00006154 | R.LQNNENN#ISCVER.G | 1 |
| IPI00006158 | K.CPGPTSGPSPGTN#LSGCIR.M | 0.7724 |
| IPI00006165 | K.NIFVN#GTTGEGLSLSV.S | 0.797 |
| IPI00006173 | K.GVVVN#SSVM*VK.F | 0.9573 |
| IPI00006173 | K.GHFIYKN#VSEDLPLPTFSPTLLGDSR.M | 1 |
| IPI00006173 | K.TVSN#LTESSSESIQSFLQSM*ITAVGIPEVM*SR.L | 0.9999 |
| IPI00006181 | R.NLAMEATYINHN#FSQQCLR.M | 0.8303 |
| IPI00006195 | K.NN#YSPTAAGTERR.K | 0.6855 |
| IPI00006195 | R.VESN#SSAHPWGLVGK.S | 0.9732 |
| IPI00006197 | Y.PDPQSANHMN#SSLLSLYR.K | 0.6374 |
| IPI00006213 | M.QINTN#KSKDASTSPPNR.E | 0.683 |
| IPI00006213 | M.NDQDLPN#WSNENVDDR.L | 0.859 |
| IPI00006266 | R.GRGASPRGGGPLILLDLNDENSN#QSFHSEGSLPKGTEP.S | 0.6518 |
| IPI00006278 | R.SFCKDQQGDHNGEN#SSK.C | 0.7131 |
| IPI00006280 | R.IVAARLN#GSLDFF.S | 0.5099 |
| IPI00006288 | K.ESYLQIPSAKVRPQTN#ITLQIATDEDSGILLYK.G | 0.5946 |
| IPI00006314 | R.N#TTLFIDQVEAK.W | 0.6619 |
| IPI00006374 | K.SSRMETVGN#ASSSSN#PSSPGRIKGR.L | 0.9833 |
| IPI00006496 | A.AEGGN#TSDTQSSSSVNIVMGPSAR.A | 0.7315 |
| IPI00006515 | K.RYN#GSDPASGPSVQDKYVTALYFTFSSLTSV.G | 0.7263 |
| IPI00006543 | R.EQFCPPPPQIPNAQN#M*TTTVNYQDGEK.V | 0.9848 |
| IPI00006552 | K.FN#LTEDM*YAQDSIELLTTSGIQFKK.H | 0.5749 |
| IPI00006612 | A.TN#ETNVNIP.Q | 0.6571 |
| IPI00006631 | R.FIN#STFLEQK.E | 0.5296 |
| IPI00006662 | R.CIQAN#YSLMENGK.I | 0.9993 |
| IPI00006662 | R.ADGTVNQIEGEATPVN#LTEPAK.L | 1 |
| IPI00006663 | R.KTFPTVN#PSTGEVICQVAEGDKEDVDK.A | 0.5661 |
| IPI00006665 | K.NGDPELNVIQNYNEGIIDN#LSK.D | 0.5882 |
| IPI00006669 | R.QSKSESDYSDGDN#DSIN#STSNSN#DTIN#CSSESSSR.D | 0.5434 |
| IPI00006674 | R.QN#NTSLRLGVYAALGILQGFLVMLAAMAMAAGGIQAAR.V | 0.8225 |
| IPI00006675 | K.M*DTELAESGSN#FSVGQR.Q | 0.7018 |
| IPI00006680 | K.LSELHDNQDGLVNMESLN#STR.S | 0.848 |
| IPI00006735 | L.QVEQQLAN#ITV.S | 0.6736 |
| IPI00006746 | R.KLQGNM*LLN#SSMEDKM*LKENPEEK.L | 0.894 |
| IPI00006803 | R.DDALKN#LSHTPVSKFVLDR.I | 0.9538 |
| IPI00006854 | R.TKSQSKLDRN#TSFR.L | 0.6814 |
| IPI00007002 | R.GIEAALGTRASASSFLN#MSRCCIR.A | 0.5876 |
| IPI00007032 | K.TNEISVIQSGGVPTLPVSLGATSVVNN#ATVSK.M | 0.5945 |
| IPI00007063 | K.EEEN#KSSSEGGDAGN#DTR.N | 0.7125 |
| IPI00007096 | C.YPDNPAN#RSLVLPWSFPLEWAPQN#LTR.W | 0.6644 |
| IPI00007124 | M.DGM*N#SSGVYASPTCSNM*AHHALSFR.G | 0.7767 |
| IPI00007160 | R.EVTNKN#GTNVFQEESR.K | 0.7667 |
| IPI00007178 | R.TGLLKQTHIAPKPAAHLAAPAN#GSAP.S | 0.7895 |
| IPI00007182 | R.ARAGHTM*N#TSPGWGSDPVILATAGYDHTVR.F | 0.7311 |
| IPI00007193 | K.NN#RSDM*M*SALGLGQEEDIESPWDSESISENFPQK.Y | 0.7689 |
| IPI00007193 | K.M*N#RTALHLACANGHPEVVT.L | 0.6784 |
| IPI00007199 | K.ETFFN#LSK.R | 0.9904 |
| IPI00007199 | K.LPYQGN#ATM*LVVLM*EK.M | 1 |
| IPI00007202 | G.SPPGFN#NTER.T | 0.9431 |
| IPI00007205 | K.VM*VVLTDGGIFEDPLN#LTTVI.N | 0.5793 |
| IPI00007210 | K.YKSVYVGEETN#ITLNDLKPAM*DYHAKVQAEYNSIK.G | 0.5686 |
| IPI00007221 | R.VVGVPYQGN#ATALFILPSEGK.M | 1 |
| IPI00007221 | K.VLPSLGISNVFTSHADLSGISN#HSNIQVSEMVHK.A | 1 |
| IPI00007221 | R.EDQYHYLLDRN#LSCR.V | 0.9996 |
| IPI00007240 | K.EHETCLAPELYNGN#YSTTQK.T | 1 |
| IPI00007240 | K.HGVIISSTVDTYEN#GSSVEYR.C | 1 |
| IPI00007248 | R.RN#ASGLTNGLSSQER.P | 0.5707 |
| IPI00007249 | R.LNN#ITMWLN#NSNPPV.T | 0.7009 |
| IPI00007250 | K.QVLLFN#NSHLTYVSFDFHEHCR.G | 0.9651 |
| IPI00007253 | L.LLSN#CSK.A | 0.7067 |
| IPI00007273 | M.FFMNHQHSTAQLN#LSNMK.I | 0.8387 |
| IPI00007296 | G.RVPVN#VTSTALLSVLDIFPTVVALAQASLPQGR.R | 0.9365 |
| IPI00007321 | G.NN#M*STPLPAIVPAARK.A | 0.844 |
| IPI00007362 | K.NGLSN#SSILLDK.C | 0.7844 |
| IPI00007367 | K.GN#M*TLSPENGYWVVIM*MK.E | 0.7557 |
| IPI00007404 | R.GFN#M*SIPMPGHPVN#FSSVTLEQAR.R | 0.7404 |
| IPI00007612 | R.MKRGYDNPNFILSEVN#ETDDTKM.- | 0.5981 |
| IPI00007614 | K.RN#ETLVFSHNAVIAMR.D | 0.8212 |
| IPI00007632 | S.LERFIHGGAN#VTGFQLVDFNTPMVTK.L | 0.5962 |
| IPI00007672 | S.KKEHISAEN#MSLETLR.N | 0.5996 |
| IPI00007682 | R.TALVAN#TSNM*PVAAR.E | 0.6446 |
| IPI00007765 | K.NAVITVPAYFN#DSQR.Q | 0.9757 |
| IPI00007775 | S.FMN#VSESHFVSALTVVFINSK.S | 0.6851 |
| IPI00007775 | K.QPKVGFYSSLN#QT.H | 0.622 |
| IPI00007778 | K.QIN#SSISGNLWDKDQR.A | 0.9991 |
| IPI00007798 | R.LLN#LSLNSEVVLDQDAIDVIIHVAR.N | 0.9597 |
| IPI00007798 | K.NNFN#GSLVQASYQHEELR.R | 0.9406 |
| IPI00007818 | R.NFNYHILSPCDLSN#YTDLAMSTVK.Q | 0.9536 |
| IPI00007818 | M.VVLEWLAN#PSNDMYADTVTTVILEVQSNPKIR.K | 0.6691 |
| IPI00007834 | T.VAPQGQDM*ASIAPDN#RSK.S | 0.5314 |
| IPI00007843 | R.NPDM*EVDEN#GTLDLSMNKQR.P | 0.8337 |
| IPI00007858 | C.LIPN#ETKTPGVMDHYLVM*HQLRCNGVLEGIR.I | 0.6604 |
| IPI00007927 | K.YLINGVNAN#NTRVQDLFCSV.G | 0.533 |
| IPI00007941 | R.YHTESLQN#M*S.K | 0.7632 |
| IPI00007979 | M.AILFNNMLSGQWTMTN#TTNQYSSLM*IMM*AMAMK.L | 0.5334 |
| IPI00008052 | E.EADVDM*EPN#VSVYSGLK.E | 0.6963 |
| IPI00008085 | A.HNHHGEN#KTVLR.K | 0.6903 |
| IPI00008091 | K.NKISIEDLLQSSM*GSTQQAQN#TTSSLMNLVM*QFR.K | 0.9063 |
| IPI00008129 | R.N#M*SQLM*ETGEVSDDLASQLIYQLVAELAK.A | 0.896 |
| IPI00008129 | L.FN#GSLLLQN#VSLENEGTYVCIATNALGK.A | 0.5277 |
| IPI00008135 | R.DYKQTGDN#LSSMLLEN#LTDN#ESENTNLKKK.V | 0.9339 |
| IPI00008135 | K.INFENAN#LSALNLK.I | 0.6945 |
| IPI00008161 | R.QDAVVAVTGDGVN#DSPALKK.A | 0.7642 |
| IPI00008198 | K.LLYNLRASLNK.N#QSSR.H | 0.5161 |
| IPI00008226 | K.LPGLAN#TTLSTPNPDTQASASPDPR.P | 0.5447 |
| IPI00008274 | K.KWRVENQEN#VSNLVIEDTELK.Q | 0.5781 |
| IPI00008283 | K.TLDLQSGLKDITGN#KSEM*IEK.P | 0.6912 |
| IPI00008334 | Y.DLKEGLLVSPGSVIM*N#GSNMAN#TSPSVKSK.E | 0.6222 |
| IPI00008372 | K.EASLADN#NTDVRLIGEKLFHGVSM*SER.C | 0.9182 |
| IPI00008372 | R.LDKSNFQQPYITN#RTFML.A | 0.5419 |
| IPI00008454 | M.APQN#LSTFCLLLLYLIGAVIAGR.D | 0.6872 |
| IPI00008490 | K.MLM*GIN#VTPIAALLYTPVLIR.F | 0.6937 |
| IPI00008494 | R.LN#PTVTYGN#DSFSAK.A | 0.9995 |
| IPI00008494 | R.AN#LTVVLLR.G | 0.9973 |
| IPI00008522 | G.IDTTSLHSHN#GSPLTSK.N | 0.5483 |
| IPI00008522 | K.IIGNSVGALGN#LTIILAIIVFVFALVGK.Q | 0.9389 |
| IPI00008556 | K.LETTVN#YTDSQRPICLPSK.G | 1 |
| IPI00008556 | R.VYSGILN#QSEIK.E | 1 |
| IPI00008556 | K.GINYN#SSVAK.S | 0.9987 |
| IPI00008558 | R.GVNFN#VSK.V | 0.9985 |
| IPI00008558 | R.IVGGTN#SSWGEWPWQVSLQVK.L | 1 |
| IPI00008558 | R.IYSGILN#LSDITK.D | 1 |
| IPI00008558 | K.IYPGVDFGGEELN#VTFVK.G | 1 |
| IPI00008558 | K.LQAPLN#YTEFQK.P | 0.9983 |
| IPI00008569 | K.EQDYLCHVYVRN#DSLAGVVIADNEYPS.R | 0.5379 |
| IPI00008588 | K.TN#DTYMKFSWLTVPEESLDKEHR.C | 0.5907 |
| IPI00008632 | T.M*NPLIYN#ITR.V | 0.6089 |
| IPI00008787 | R.VFPQVN#VTK.M | 0.9774 |
| IPI00008822 | M.ATYSATCAN#NSPAQGINMANSIANLRLK.A | 0.8428 |
| IPI00008829 | R.AYYGNINFFGGPSN#TSV.K | 0.5929 |
| IPI00008868 | R.DVMSDETNNEETESPSQEFVN#ITK.Y | 0.813 |
| IPI00008884 | D.DDLIISQDTDIIQDMVAGEN#TSEAGSEDEGEVSLPEQPK.V | 0.9406 |
| IPI00008887 | K.MDIEN#LTISNAQ.M | 0.5802 |
| IPI00008905 | M.ISN#MSEESANM*IASALAQIPQKVLWR.F | 0.914 |
| IPI00008909 | R.ILSN#M*TFLFVSLSYTAESAIVTAFITFI.P | 0.7843 |
| IPI00008913 | R.NRHDLLN#VSQGTVFIFWGPSSYMR.R | 0.7151 |
| IPI00008918 | A.VSKQSSSTN#YTNELK.A | 0.8421 |
| IPI00008918 | R.SNTEN#LSQHFR.K | 0.6229 |
| IPI00008942 | R.TCYYPTTVCLPGCLN#QSCGSS.C | 0.8511 |
| IPI00008982 | T.KSRVGMGGMEAKVKAALWALQGGTSVVIAN#GTHPK.V | 0.7814 |
| IPI00008982 | R.NLN#GTLHELLRM*NIVPIVNTNDAVV.P | 0.6147 |
| IPI00008993 | K.SVNKMQEATPSAQATN#ETQM*CYASLDHSVK.G | 0.6581 |
| IPI00009009 | M.ENILSGNPLLN#LTGPSQPQANFK.V | 0.6902 |
| IPI00009030 | R.VQPFN#VTQGK.Y | 0.8397 |
| IPI00009030 | K.IAVQFGPGFSWIAN#FTK.A | 1 |
| IPI00009030 | K.VASVININPN#TTHSTGSCR.S | 0.9999 |
| IPI00009030 | K.WQMN#FTVR.Y | 0.9569 |
| IPI00009054 | R.KLYKCPACGETLQDSTGN#FSSPEYPNGYSAHM.H | 0.728 |
| IPI00009101 | R.AETQGAN#HTPVISAHQTR.S | 0.8619 |
| IPI00009135 | K.ANQQLN#FTEAK.E | 0.9998 |
| IPI00009137 | R.TPQVIGVMQSQN#SSAGNR.G | 0.6672 |
| IPI00009143 | K.YMISTSETIIDIN#GTVMN#YSGWSHR.D | 0.5276 |
| IPI00009149 | K.RAM*N#KSFM*ESGGTVLSTN#WSDVGKRK.V | 0.9192 |
| IPI00009243 | K.FCVVLLHWEFIYVITAFN#LSYPITPWR.F | 0.9082 |
| IPI00009268 | K.DM*N#LTLEPEIM*PAATDNRYIR.A | 0.7641 |
| IPI00009291 | R.GLN#SSFETSPKK.V | 0.7305 |
| IPI00009329 | R.IPRADELN#QTGQILVEQMGK.E | 0.7349 |
| IPI00009477 | K.HYLVSN#ISHDTVLQCH.F | 0.9946 |
| IPI00009477 | R.GN#ETLHYETFGK.A | 0.9998 |
| IPI00009477 | K.AAPAPQEATATFN#STADR.E | 0.9997 |
| IPI00009499 | R.ESIASYLSLTSEDN#TSFDRKK.K | 0.8712 |
| IPI00009504 | R.KGIIDVNLYN#ETVETLMAG.E | 0.5421 |
| IPI00009521 | R.VDN#FTQNPGM*FR.I | 0.9997 |
| IPI00009604 | R.SSN#SSVSGTKKEDSTAKIH.A | 0.7481 |
| IPI00009612 | R.NFDN#SSQN#TTASVSSKGPM*ILLQAT.K | 0.7958 |
| IPI00009618 | R.LM*LPDDTTN#HSN#SSK.E | 0.7359 |
| IPI00009631 | R.N#SSLGDAINKYDVVIRLNNAPVAG.Y | 0.6899 |
| IPI00009646 | R.RLRELAGN#SSTPPPVSPGRGNPM*HRLLNP.F | 0.7324 |
| IPI00009655 | C.FPTLSDFLTEIN#STVDK.D | 0.8633 |
| IPI00009703 | M.SQHYQSGPVPGTAIN#GTLPLS.H | 0.8971 |
| IPI00009704 | R.VVSN#SSVLASQSVGITNVRT.V | 0.7275 |
| IPI00009791 | K.KGDGLQLPAADGAAASNAADSAN#ASLVNGK.M | 0.8429 |
| IPI00009791 | K.QN#SSPPSSLNKN#NSAIDSGIN#LTTDTSK.S | 0.6347 |
| IPI00009793 | R.KN#QSVNVFLGHTAIDEMLK.L | 0.9367 |
| IPI00009793 | K.GFLALYQTVAVN#YSQPISEASR.G | 1 |
| IPI00009793 | R.QDGEEVLQCM*PVCGRPVTPIAQN#QTTLGSSR.A | 0.9998 |
| IPI00009793 | N.VLPVCLPDN#ETLYR.S | 0.827 |
| IPI00009802 | K.N#SSTAEIN#ETTTSSTDFLARAYGFEMAKE.F | 0.9241 |
| IPI00009803 | K.M*N#LTFHVINTGNSMAPN#VSVEIM*VPNSFSPQTDK.L | 0.8668 |
| IPI00009803 | K.TLMLN#VSLFNAGDDAYETTLHVK.L | 0.6288 |
| IPI00009804 | K.EHSEMSNN#VSDPKGPPAKIAR.L | 0.687 |
| IPI00009804 | R.NGKPEN#NTMNIN#ASIYDEIQQEMK.R | 0.6373 |
| IPI00009822 | K.GLFKGGDMSKN#VSQSQMAK.L | 0.5094 |
| IPI00009841 | M.GVYGQESGGFSGPGEN#RSMSGPDNRGR.G | 0.6221 |
| IPI00009861 | -.MDPN#CSCAAGVSCTCASSCKCKECK.C | 0.644 |
| IPI00009865 | K.TIDDLKNQILN#LTTDNANILLQIDNAR.L | 0.9999 |
| IPI00009896 | M.ALVLSN#FSTLTLLLGQR.F | 0.9324 |
| IPI00009906 | I.VLNN#LSVNAEN.Q | 1 |
| IPI00009910 | K.HLDLSSNLLKTIN#KSALETK.T | 0.79 |
| IPI00009910 | K.KQN#DSVIAECSNRR.L | 0.6285 |
| IPI00009913 | M.FSLITWNIDGLDLNN#LSER.A | 0.5047 |
| IPI00009920 | K.VLN#FTTK.A | 0.9934 |
| IPI00009920 | R.TRLSSN#STK.K | 0.9678 |
| IPI00009961 | K.EGEHDLVQGSGQQPQAGLSQAN#FTLGPVSR.S | 0.9394 |
| IPI00009992 | K.IGHPHGLQVTYLKDN#STR.N | 0.6302 |
| IPI00009995 | K.GVARVVN#ITSPGHDASSR.S | 0.6514 |
| IPI00009997 | R.VAQPGINYALGTN#VSYPNNLLR.N | 0.9618 |
| IPI00010037 | K.HTGPGILSM*ANAGPNAN#GSQFFM*CPA.K | 0.7553 |
| IPI00010065 | R.NPFHHSLPFSIPVHFTN#GTYHVVGFDGSSTVDEFLQR.L | 0.623 |
| IPI00010088 | M.PIASEFAPDVVLVSSGFDAVEGHPTPLGGYN#LSAR.C | 0.8827 |
| IPI00010134 | N.#CTCVGIAASKSGN#SSGIVGRCQK.D | 0.6131 |
| IPI00010141 | R.IIKEALPDGVN#ISK.E | 0.5035 |
| IPI00010193 | G.N#MSGN#FTYIIDK.L | 0.9081 |
| IPI00010196 | L.LSN#KTNAVEENK.A | 0.5128 |
| IPI00010196 | R.SPYNSHM*GNN#ASRPHSANGEVYGLLGSVLTIKK.E | 0.8051 |
| IPI00010213 | M.EVCNN#ETISVSSYK.I | 0.8865 |
| IPI00010221 | R.N#CTTLQGLAPGTAYLVTVTAAFRSGR.E | 0.6559 |
| IPI00010250 | K.GTN#SSASSNFRCR.S | 0.8811 |
| IPI00010272 | R.NSKN#CTEPALHEFPNDIFTNEDRR.Q | 0.9345 |
| IPI00010281 | K.TN#GTLLRNGGLPGGPNKIPNGDICCIPNSNLDK.A | 0.7153 |
| IPI00010286 | F.NEHMTN#STMSPGTVGQSLK.S | 0.8811 |
| IPI00010286 | K.QLNVQMN#MSNVMGN#TTWTTSGLK.S | 0.7521 |
| IPI00010381 | R.NKEVN#ISAVVWPS.Q | 0.5495 |
| IPI00010421 | K.KQIN#DSANLR.E | 0.5543 |
| IPI00010433 | R.SM*NPN#VSMVSSASSSPSSSR.T | 0.6833 |
| IPI00010448 | K.ATMGLLQNKENN#NTKDSPSR.Q | 0.6608 |
| IPI00010463 | K.LLQTTN#NSPM*NSK.P.Q | 0.5738 |
| IPI00010487 | K.RYN#QSMVTAELQR.L | 0.5103 |
| IPI00010540 | R.LDN#ITQVM*SLHTQYLESFLR.S | 0.6334 |
| IPI00010540 | K.FRM*VYN#LTYNTM*ATHEDVDTTMLR.R | 0.9082 |
| IPI00010625 | M.NN#NSGAPATAPDSAGQPPALGPVFELVSK.E | 0.5206 |
| IPI00010676 | R.GPM*NQCLVATGTHEPKN#QSYMVR.G | 0.9334 |
| IPI00010700 | K.ETPPNGN#LSPAPRLR.R | 0.6319 |
| IPI00010728 | R.GVSGDRDENSFSLN#SSISSSAR.R | 0.6981 |
| IPI00010790 | M.IEN#GSLSFLPTLR.E | 0.9074 |
| IPI00010807 | Y.N#RTDLTTAAPSPPR.R | 0.9763 |
| IPI00010862 | K.GTGSWTQLYLITDYHEN#GSLYDYLK.S | 0.5774 |
| IPI00010903 | R.LINLYIIQN#NSFS.Q | 0.5246 |
| IPI00011031 | M.GINECQYQFRFGRWN#CSALGEK.T | 0.7317 |
| IPI00011041 | -.MDGDN#QSENSQFLLLGISESPEQQR.I | 0.5781 |
| IPI00011092 | M.TSGN#ISVSWPATK.E | 0.7217 |
| IPI00011092 | M.LSSSSEMNEEFLKEN#NSVEYKKSK.A | 0.5895 |
| IPI00011155 | R.SLKEAFSN#FSSSTLTEVQAISTHGGSVGDK.I | 0.6585 |
| IPI00011155 | R.FVACQM*ELLHSN#GSQR.T | 0.9947 |
| IPI00011168 | R.GISARVWGHFPKWLN#GSLLRIG.P | 0.6584 |
| IPI00011177 | Y.LAN#LTQSQIALNEKR.V | 0.7331 |
| IPI00011180 | K.AYTDFQNN#HSSPK.P | 0.7463 |
| IPI00011218 | K.VLTLNLDQVDFQHAGN#YSCVASNVQGK.H | 0.9379 |
| IPI00011218 | R.HTN#YSFSPWHGFTIHR.A | 0.9994 |
| IPI00011218 | K.VM*VEAYPGLQGFN#WTYLGPFSDHQPEPK.L | 0.9985 |
| IPI00011219 | R.HSSTDSNKASSGDISPYDN#NSPVLSER.S | 0.9822 |
| IPI00011229 | K.GSLSYLN#VTR.K | 0.9947 |
| IPI00011252 | R.GGSSGWSGGLAQN#R.S | 0.9998 |
| IPI00011255 | K.VASHLEVNCDKRN#LTALPPDLPK.D | 0.9977 |
| IPI00011264 | R.SPYEM*FGDEEVMCLNGN#WTEPPQCK.D | 0.9927 |
| IPI00011285 | K.RDFFLAN#ASRARSEQFINLR.E | 0.5852 |
| IPI00011374 | R.LECN#GTISAHCNLHLPGSSDSPASSSRVAGITGIK.T | 0.892 |
| IPI00011528 | K.SAMPIEVMMN#ETAQQNMENHPVIR.T | 0.9028 |
| IPI00011538 | R.KKN#LTLALEALVQLR.G | 0.8122 |
| IPI00011578 | C.N#ATNAIGSASVVTVLR.V | 0.6967 |
| IPI00011601 | K.AN#MTLTSGIMFIVSGLCAI.A | 0.981 |
| IPI00011609 | K.GASSAYLENSKGAPN#NSCSEIKM*NK.K | 0.8334 |
| IPI00011651 | R.SDFSQTM*LFQAN#TTR.I | 0.9999 |
| IPI00011651 | K.VEFHWGHSN#GSAGSEHSINGR.R | 0.9516 |
| IPI00011651 | S.GVTHAAEERN#QTEPSPTPSSPN#R.T | 0.7968 |
| IPI00011651 | K.NRN#SSVVPSERARVGL.A | 0.5831 |
| IPI00011665 | K.DFLN#VTTEANIL.P | 0.5409 |
| IPI00011730 | K.VNLNSVSKSLTGLSDSVSQYSDAFLAAN#TSLDER.E | 0.6698 |
| IPI00011756 | R.SAN#LTDQPSW.N | 0.7055 |
| IPI00011757 | R.KLN#PSQN#ATGTSRS.E | 0.51 |
| IPI00011798 | K.RN#ASSSSHSSTEGLQELK.R | 0.526 |
| IPI00011836 | R.YVKQPLPDEFGSSPLEPGACN#GS.R | 0.748 |
| IPI00011879 | K.VN#GSHEANMLSQVHR.- | 0.6038 |
| IPI00011989 | Q.VGIYN#GTHVIPNDR.K | 0.9222 |
| IPI00012009 | M.N#LSWDCQEN#TTFSKCFLTDK.K | 0.5996 |
| IPI00012033 | R.RPLVLQLVN#ATTEYAEFLHCK.G | 0.5378 |
| IPI00012058 | E.EYKNYLDAAN#MSMRVR.R | 0.6311 |
| IPI00012113 | R.TLPLILILLALLSPGAADFN#ISSLSGLLSPALT.E | 0.5196 |
| IPI00012136 | R.RRGRPRGNN#LSTISDTSPMKR.S | 0.6504 |
| IPI00012136 | M.GN#STDPGPM*LAIPAMATNPQNAASR.R | 0.8807 |
| IPI00012165 | R.VVLLDPKPVAN#VTCVNK.H | 0.8881 |
| IPI00012221 | E.QTYHMALNAATFPKN#ATWIGPLW.- | 0.797 |
| IPI00012269 | K.FNPGAESVVLSN#STLK.F | 1 |
| IPI00012269 | K.LQN#LTLPTN#ASIK.F | 0.9972 |
| IPI00012318 | K.CRLDVNTELN#SSIEDLLEASMPSSD.T | 0.9028 |
| IPI00012363 | K.SLM*DQLQGVVSN#FSTAIPDFHAVLAGPGGPGNGLR.S | 0.8632 |
| IPI00012390 | M.KKVHVNSVNPN#YTGGEPK.R | 0.9153 |
| IPI00012391 | R.QM*SQQN#LTK.Q | 0.7042 |
| IPI00012471 | K.MSHPPNIPKEQTPAGTSN#TTSVSV.K | 0.5742 |
| IPI00012488 | K.VTGSGGPFKSDPHWESMLN#ATTR.R | 0.8033 |
| IPI00012503 | R.TN#STFVQALVEHVKEECDR.L | 0.9923 |
| IPI00012503 | R.NLEKN#STKQEILAALEK.G | 0.6514 |
| IPI00012508 | R.YLINSYDFVN#DTLSLK.H | 0.678 |
| IPI00012519 | V.YYM*VVCLVAFTIVMVLN#ITR.L | 0.917 |
| IPI00012545 | K.DGSN#KSGAEEQGPIDGPSKSGAEEQTSK.D | 0.6523 |
| IPI00012574 | A.MVN#TTQQQGLSN#ASTEGPVADAFN#NSSISIK.E | 0.9076 |
| IPI00012578 | R.VQN#TSLEAIVQN#ASSDNQGIQLSAVQAAR.K | 0.5783 |
| IPI00012585 | K.LDSFGPIN#PTLN#TTYSFLTTFFK.E | 0.9903 |
| IPI00012728 | K.RKEAELRSGIIRN#NSLWDR.L | 0.5083 |
| IPI00012730 | G.AASYFLILDSTNTVPDSAGSGN#VTR.C | 0.562 |
| IPI00012773 | K.AGVVN#GTGAP.G | 0.7917 |
| IPI00012773 | K.VAPVINN#GSPTILGKR.S | 0.5426 |
| IPI00012792 | R.EVYPWYN#LTVEAK.E | 0.9992 |
| IPI00012792 | R.LDREN#ISEYHLTAVIVDK.D | 1 |
| IPI00012792 | R.AQVIIN#ITDVDEPPIFQQPFYHFQLK.E | 1 |
| IPI00012828 | K.DGSTTAGN#SSQVSDGAAAILLARR.S | 0.7344 |
| IPI00012843 | L.SSLSPVN#SSNHGPVSTGSLTN#R.S | 0.8791 |
| IPI00012876 | R.N#RSFQPGLDNIIFVVETGPL.P | 0.718 |
| IPI00012885 | M.ADLIDGYCRLVN#GTSQSFIIRPQK.E | 0.56 |
| IPI00012887 | K.YSVAN#DTGFVDIPK.Q | 0.5022 |
| IPI00012891 | R.CEGSQPWN#LTPR.Q | 0.9283 |
| IPI00012990 | I.IAAGVAHAITAACTHGN#LSDCGCDKEK.Q | 0.6049 |
| IPI00013010 | D.LGNVPN#GSALTDGSQLPSR.D | 0.5082 |
| IPI00013049 | K.VSRIPQGTFSNLEN#LTLLDLQNNK.L | 0.879 |
| IPI00013096 | N.#ISRLDPQTN#SSQIKDEFQTLNIVTPR.V | 0.5466 |
| IPI00013174 | M.SQGAVANAN#STPPPYERTR.L | 0.7707 |
| IPI00013177 | K.RVYSLMEN#NSYPRFLESEFYQDLCK.K | 0.8289 |
| IPI00013179 | R.WFSAGLASN#SSWLR.E | 1 |
| IPI00013179 | K.SVVAPATDGGLN#LTSTFLR.K | 1 |
| IPI00013226 | R.RGASVN#RTTRTN#STPLR.A | 0.7364 |
| IPI00013234 | K.LKLFLN#ETQTQEITEDIPVKTLNM*K.T | 0.6948 |
| IPI00013299 | K.SAWCEAKN#ITQIVGHSGCEAK.S | 0.838 |
| IPI00013303 | K.ISN#ISSDVTVNEGSN#VTLVCMANGR.P | 0.5254 |
| IPI00013409 | R.YTVSN#LSMQTHAARFK.T | 0.5053 |
| IPI00013414 | K.LQDIFYPN#TSNCAK.G | 0.716 |
| IPI00013436 | K.LQINN#LTMNLIELEN.- | 0.725 |
| IPI00013437 | K.AFSN#SSTLANHKITHTEEKPYKCK.E | 0.5749 |
| IPI00013441 | R.THKM*N#VSPVPPLR.R | 0.6668 |
| IPI00013452 | N.#ISSN#SSASILESK.S | 0.5018 |
| IPI00013492 | R.SGTNHYSTSSCTPPAN#GTDSIMANR.G | 0.5103 |
| IPI00013624 | K.EYPN#LSTSLDDAFLLR.F | 0.9721 |
| IPI00013712 | R.LLQMPSVVN#YSGLRK.R | 0.5647 |
| IPI00013743 | R.RARHDSPDLAPN#VTYSLPRTK.S | 0.7072 |
| IPI00013744 | V.AIVYN#ITLDADGFSSR.V | 0.7322 |
| IPI00013877 | R.MGM*GNN#YSGGYGTPDGLGGYGRGGGGSGGYYGQGGMSGGGWR.G | 0.9609 |
| IPI00013880 | W.TPVN#ISDNGDHYEQR.F | 0.5364 |
| IPI00013892 | K.GEGLN#KTVIGDYLGERDEFNIK.V | 0.7954 |
| IPI00013928 | M.N#NSESHFVPNSLIGMGVLSCVFNSLAGK.I | 0.6737 |
| IPI00013967 | R.LN#M*TTEQFTGDHTQHFLDGGE.M | 0.527 |
| IPI00013970 | T.DCGHTWNSPN#CTDPKLLN#GSVLGN#HTK.Y | 0.5064 |
| IPI00013972 | M.SEEVTGQFSVHPETPKPSISSN#NSNPVEDK.D | 0.7948 |
| IPI00014011 | K.DLYRSN#ISPLTSEKDLDDFR.R | 0.9479 |
| IPI00014053 | K.GLSNHFQVN#HTVALSTIGESNYHFG.V | 0.8905 |
| IPI00014072 | K.RRPLNN#NSEIALS.L | 0.7144 |
| IPI00014147 | K.VLGSSTSATN#STSVSSR.K | 0.97 |
| IPI00014186 | K.ASASPGEN#DSGTGGEEPQRDK.R | 0.601 |
| IPI00014194 | M.CVKN#STGVEIK.R | 0.9649 |
| IPI00014202 | V.N#LTGLDLSQNN#LSSVTNINVKK.M | 0.9364 |
| IPI00014211 | G.KSVLVN#GTKER.D | 0.6008 |
| IPI00014312 | R.DM*SISN#TTM*DEFR.Q | 0.8411 |
| IPI00014319 | G.HKQISSSSTGCLSSPN#ATVQSPK.H | 0.6699 |
| IPI00014335 | R.DATGNMN#DTIISGM*NCN#GSAACGLGYD.F | 0.9396 |
| IPI00014456 | R.HIKFYDN#NTGK.L | 0.8422 |
| IPI00014502 | E.PCYVSASEIKFDSQEGSVDQN#HSWLGRKRR.N | 0.6144 |
| IPI00014544 | T.NN#ISLMATLK.A | 0.6331 |
| IPI00014553 | M.QSQAGGN#NTGSTPLR.K | 0.75 |
| IPI00014802 | A.VSQN#WTFHGPGASGQAAANWLAGFGR.G | 0.847 |
| IPI00014829 | K.N#GTIFTISPVLLLDTISTTR.F | 0.8234 |
| IPI00014845 | M.ITVVQTYSTLSN#STIEGIDIMAIKFR.N | 0.8202 |
| IPI00014898 | M.NEILTDPSDDTKGFFDPNTEEN#LTYLQLM*ER.C | 0.6611 |
| IPI00015102 | R.TVNSLN#VSAISIPEHDEADEISDENR.E | 0.7966 |
| IPI00015102 | N.#LSEN#YTLSISNARISDEK.R | 0.9391 |
| IPI00015102 | K.NAIKEGDN#ITLK.C | 0.8636 |
| IPI00015115 | R.VEIISN#NSIQAVFN#PTGVYAPSGYSYR.C | 0.5105 |
| IPI00015283 | K.N#CTNN#CTFVYAAEQPPEAPGK.I | 0.7401 |
| IPI00015286 | K.WRSN#TSLLQQNLR.Q | 0.5223 |
| IPI00015309 | -.MDLSN#NTM*SLSVRTPGLSR.R | 0.5004 |
| IPI00015345 | P.GAYN#NTALFEESGLIR.I | 0.9034 |
| IPI00015467 | K.N#QSASPPPKDRSSSPATEQSWTQ.N | 0.6481 |
| IPI00015488 | R.DLDGFLAQASIVLN#ETATSLDNVLRTMLRR.F | 0.9121 |
| IPI00015508 | V.QDSVN#ISGHTNTNTLK.V | 0.748 |
| IPI00015525 | F.GNFQGLMEAN#VSLDLGK.L | 0.9741 |
| IPI00015525 | K.FN#TTYINIGSSYFPEHGYFR.A | 1 |
| IPI00015525 | R.SFN#QSLHSLTQAIR.N | 0.7485 |
| IPI00015553 | V.YN#PSGLN#LSIK.G | 0.833 |
| IPI00015573 | R.QLCGLLLGGGGN#RSHSTPYCGLR.R | 0.7096 |
| IPI00015688 | C.CTSEMEENLAN#R.S | 0.8297 |
| IPI00015745 | K.TGTTLN#TSIIFGPN#LS.- | 0.6054 |
| IPI00015749 | K.NFAQNRGAGN#TSSLNPLAVGFVQTPPVISSAHIQDER.V | 0.9563 |
| IPI00015782 | R.SLSTPNALSFGSPTSSDDM*TLTSPSM*DN#SSAE.L | 0.8927 |
| IPI00015830 | K.FCHSQLSN#NSVSFFLYNLDHSHANYYFCN.L | 0.5405 |
| IPI00015902 | D.AYYVYRLQVSSIN#VSVNAVQTVVR.Q | 0.5157 |
| IPI00015902 | R.SILHIPSAELEDSGTYTCN#VT.E | 0.5395 |
| IPI00015911 | A.LLN#NSHYYHM*AHGTDFASR.G | 0.8476 |
| IPI00015952 | R.DDNSAAN#NSANEKER.H | 0.5125 |
| IPI00015963 | K.LMISSYSGSVDIVN#TTDGCH.E | 0.6129 |
| IPI00015980 | R.LM*QGDQILM*VNGEDVRN#ATQEAVAALLK.C | 0.5682 |
| IPI00015990 | K.GQNLNN#YSFSTNGFSGSGGSGSHGS.S | 0.695 |
| IPI00015994 | K.QQN#HTLDYNLAPGPLGR.G | 0.7563 |
| IPI00016006 | R.EAPGM*ALMALMGSLN#VTP.L | 0.7394 |
| IPI00016053 | R.RLSLN#QSR.G | 0.9005 |
| IPI00016095 | K.ELVNAGCN#LSTLN#ITLLSWSKK.R | 0.9813 |
| IPI00016339 | K.LPKNEPQN#ATGAPGR.N | 0.5492 |
| IPI00016371 | K.M EDGLLTCHGPGPDN#CTKCSHFK.D | 0.6301 |
| IPI00016422 | R.EGDNRERALN#TTQPGSLQLTVGNLK.P | 0.7916 |
| IPI00016454 | R.VMVHGRN#HTPFLGHHS.F | 0.5467 |
| IPI00016475 | R.LQQLAEPQSDLEELKHEN#K.S | 0.515 |
| IPI00016480 | K.ENLPEN#VTASESDAEVER.S | 0.5715 |
| IPI00016488 | D.YNVQTSN#WTR.T | 0.6482 |
| IPI00016542 | R.LKN#ISENADFFASLQLSESAARLREM.I | 0.9726 |
| IPI00016553 | K.ASLCLPTTSAPASAPSNGN#CS.S | 0.9822 |
| IPI00016589 | K.EN#STASEVLDSLSQSVHVKPENLR.L | 0.5232 |
| IPI00016590 | R.SIQKLGELNIGM*DGLGNEVSALNQQCN#GSK.G | 0.5157 |
| IPI00016633 | R.HVLATILAQLSDMDLIN#VSK.V | 0.7999 |
| IPI00016637 | R.FIGLTNSFGFGGTN#A.T | 0.5093 |
| IPI00016645 | R.PPSAPQNLIFNIN#QTTVSLEWSPPADNGGR.N | 0.5488 |
| IPI00016645 | K.DN#FTAAGYNSLES.V | 0.5271 |
| IPI00016665 | K.HQVEALKNMQHQN#QSLSM*LDEILEDVRK.A | 0.6939 |
| IPI00016677 | K.SEM*AQIQQNAVQN#HTATMLEIGTSLLSQTAEQTRK.L | 0.5277 |
| IPI00016677 | R.DCADVYQAGFN#KSGIYTIYINNM*PEPK.K | 0.8654 |
| IPI00016701 | K.RGN#TTLESTD.T | 0.5684 |
| IPI00016709 | K.RLVSMNM*PLNSDGTVMFN#ATLFALVRTALRIK.T | 0.9595 |
| IPI00016709 | K.CAPESEPSN#STEGETP.C | 0.5736 |
| IPI00016709 | K.LM*GSAGN#ATISTVSSTQRKR.Q | 0.55 |
| IPI00016780 | -.MNQN#TTEPVAATETLAEVPEHVLR.G | 0.5736 |
| IPI00016783 | R.SQSSSQSPASHRN#PTGAHSSSGHQSQSPN#TSPPPKRHK.K | 0.5254 |
| IPI00016890 | K.EPHLN#YSPTCLEPPVLSIHPGAID.- | 0.9034 |
| IPI00016906 | R.GATAAVLAPDSSN#ASSEPSS.- | 0.8257 |
| IPI00016906 | K.VKM*VVSREEVELAYQEAMFNMATLN#RTAAGLMHT.F | 0.7829 |
| IPI00016949 | R.M*FTNPDN#GSPAM*THRN.L | 0.6304 |
| IPI00017025 | M.ANAGPNTN#GSQCFICTAK.T | 0.6715 |
| IPI00017070 | R.DPNIEALNGN#CSDTEIHEK.E | 0.571 |
| IPI00017094 | M.VISPSGFTASPYEGEN#SSNIIPQQM*AAHMLR.S | 0.606 |
| IPI00017094 | M.N#STDIQWSAILSWGYADNILRLK.S | 0.6979 |
| IPI00017163 | R.STIISN#TTNPIWHR.E | 0.8535 |
| IPI00017174 | R.PQSN#SSAVTGTSGSIM*ENGVSSSNTADK.S | 0.5115 |
| IPI00017203 | R.LIGEPDLVVSVIPN#NSNENIPR.V | 0.6294 |
| IPI00017234 | R.RNAEWHVHM*M*EYYAAENMNN#WSHGM*NEAER.F | 0.5073 |
| IPI00017373 | K.M*FILSDGEGKN#GTIELMEP.L | 0.9304 |
| IPI00017381 | R.VLELN#ASDERGIQVVREK.V | 0.9425 |
| IPI00017390 | R.WEYCN#LTR.C | 0.9997 |
| IPI00017405 | K.VLLN#SSVPPAGAEELSSAMANPPPKR.P | 0.7221 |
| IPI00017480 | R.LLLTAAHLLFVAPHN#DSATGEPEASSGSGPPSGGALGPR.A | 0.9963 |
| IPI00017522 | M.HAVVFGN#VTAIIQR.M | 0.7185 |
| IPI00017562 | K.GDYN#DSVQVVDCGLSLN#DTAFEK.M | 0.5841 |
| IPI00017601 | K.LEFALLFLVFDEN#ESWYLDDNIK.T | 0.9879 |
| IPI00017601 | K.AGLQAFFQVQECN#K.S | 1 |
| IPI00017601 | K.EN#LTAPGSDSAVFFEQGTTR.I | 1 |
| IPI00017601 | K.EHEGAIYPDN#TTDFQR.A | 1 |
| IPI00017601 | K.ELHHLQEQN#VSNAFLDK.G | 1 |
| IPI00017601 | R.QKDVDKEFYLFPTVFDEN#ESLLLEDNIR.M | 0.9993 |
| IPI00017603 | R.NLFLTNLDNLHEN#NTHNQEK.K | 0.829 |
| IPI00017617 | R.LM*EEIMSEKEN#KTIVFVETK.R | 0.6564 |
| IPI00017640 | R.HLTLIDLSN#NSISMLTN#YTFSN#M*S.H | 0.5467 |
| IPI00017640 | R.HLTLIDLSN#NSISM*LT.N | 0.7484 |
| IPI00017648 | K.FGLYHVDFN#NTNRPR.T | 0.9931 |
| IPI00017696 | K.TM*QEN#STPRED.- | 1 |
| IPI00017696 | K.NCGVN#CSGDVFTALIGEIASPNYPK.P | 0.9996 |
| IPI00017696 | H.CAGN#GSWVNEVLGPELPK.C | 0.7099 |
| IPI00017734 | K.GLGAQTGVLRM*KGVN#LS.C | 0.6495 |
| IPI00017818 | A.EESPFVGNPGN#ITGAR.G | 0.9891 |
| IPI00017841 | K.VQN#M*SQSIEVLDR.R | 0.9999 |
| IPI00017919 | R.ESNAPSVPTVSLLPGAPGGN#ASS.R | 0.6685 |
| IPI00017940 | M.EEVRKVN#ESIK.Y | 0.55 |
| IPI00017964 | M.SN#ITVTYR.D | 0.9826 |
| IPI00018071 | R.EALN#ISSSISESGGLNWKM*.T | 0.7432 |
| IPI00018073 | R.DEDTLQDPAPLETPM*N#ASSSHS.C | 0.7424 |
| IPI00018098 | K.N#ESKEKSNK.R | 0.7036 |
| IPI00018198 | M.AAANPWDPASAPNGAGLVLGHFIASGMVNQEMLN#MSKK.T | 0.5016 |
| IPI00018214 | K.N#HTHQQDIDDLKRQNALLEQQVR.A | 0.5199 |
| IPI00018251 | M.MRGQGLN#M*TPSMVAPSGMPATMSNPR.I | 0.8896 |
| IPI00018287 | K.ALWN#SSVPVCEQIFCPNPPAILNGRH.T | 0.5438 |
| IPI00018305 | R.AYLLPAPPAPGN#ASESEEDR.S | 1 |
| IPI00018305 | K.VDYESQSTDTQN#FSSESK.R | 1 |
| IPI00018305 | R.GLCVN#ASAVSR.L | 1 |
| IPI00018313 | R.FLIEDINDNAPLFPATVIN#ISIPENSAINSK.Y | 0.6066 |
| IPI00018313 | R.YIVNPVN#DTVVLSENIPLNTKI.A | 0.6323 |
| IPI00018672 | R.VSGAVATAVLWVLAALLAMPVMVLRTTGDLEN#TTK.V | 0.8758 |
| IPI00018678 | F.VQN#CTSLNSLNEVIPTDLQSK.F | 0.7695 |
| IPI00018810 | K.VGSFGN#GTVLR.S | 0.7229 |
| IPI00018860 | K.TFLHYDCGN#KTVTPVSPLGKK.L | 0.9597 |
| IPI00018953 | R.IPN#NTQWVTWSPVGHK.L | 0.6221 |
| IPI00018953 | K.KLDFIILN#ETK.F | 0.9992 |
| IPI00018956 | K.NSDFYMGAGGPLEHVM*ETLDN#ESFYSK.A | 0.824 |
| IPI00019006 | M.KYLN#LSSTR.I | 0.7613 |
| IPI00019020 | L.FQN#ITLEDAGSYTLR.T | 0.5141 |
| IPI00019056 | R.DN#LSETASTM*ALAGASITGSLSGSAM*VNCFNR.L | 0.9179 |
| IPI00019148 | K.TMN#NSAEN#HTAN#SSMAYPSLVAM*ASQR.Q | 0.7877 |
| IPI00019157 | R.YVHDGSETLTDSFVLMAN#ASEMDR.Q | 0.7313 |
| IPI00019157 | R.GVN#ASAVVN#VTVRALLHVWAGGPWPQGATLR.L | 0.6806 |
| IPI00019223 | K.HSRIVELLN#ETEKYK.L | 0.64 |
| IPI00019226 | A.YLM*EPLCISSN#ESSEGCCPPSGTR.Q | 0.5861 |
| IPI00019226 | M.FQNAVMYN#SSDHDVYHMAVEM*QR.D | 0.7918 |
| IPI00019243 | P.RMSVLRSAETM*QSALAAMQQFYGIN#M*TGK.V | 0.8088 |
| IPI00019308 | A.IM*NN#MSLIIHR.S | 0.7765 |
| IPI00019311 | R.CFPWTN#ITPPALPGITN#DTTIQQGISGLIDSLNAR.D | 0.9139 |
| IPI00019359 | K.N#YSPYYNTIDDLKDQIVDLTVGNN#K.T | 0.6174 |
| IPI00019391 | F.HGLYEEKN#LSPGFNFR.F | 0.6242 |
| IPI00019399 | R.VYLQGLIDYYLFGN#SSTVLEDSK.S | 0.9998 |
| IPI00019449 | R.CKNQNTFLLTTFANVVNVCGNPN#M*TCPSN#K.T | 0.6502 |
| IPI00019450 | T.PADVFIVFTDN#ETFAGGVHPAIALR.E | 0.6459 |
| IPI00019450 | R.VLGSILN#ASTVAAAMCM*VVTR.T | 0.5794 |
| IPI00019464 | K.DRN#ASNDGFEM*CSLSDFSANEQK.S | 0.5948 |
| IPI00019491 | K.QDYNMDLELDEYYN#KTLATEN#N.T | 0.7281 |
| IPI00019537 | R.SSINSVDGESPN#GSSDR.G | 0.576 |
| IPI00019568 | R.SEGSSVN#LSPPLEQCVPDR.G | 0.8766 |
| IPI00019568 | R.YPHKPEIN#STTHPGADLQENFCR.N | 1 |
| IPI00019568 | K.N#FTENDLLVR.I | 0.9816 |
| IPI00019568 | R.GHVN#ITR.S | 0.7855 |
| IPI00019571 | K.NLFLN#HSEN#ATAK.D | 1 |
| IPI00019571 | K.VVLHPN#YSQVDIGLIK.L | 1 |
| IPI00019571 | K.MVSHHN#LTTGATLINEQWLLTFAK.N | 1 |
| IPI00019580 | R.GNVAVTVSGHTCQHWSAQTPHTHN#R.T | 0.9931 |
| IPI00019581 | R.N#HSCEPCQTLAVR.S | 0.9997 |
| IPI00019581 | R.N#VTAEQAR.N | 0.9524 |
| IPI00019591 | R.SPYYN#VSDEISFHCYDGYTLR.G | 1 |
| IPI00019591 | K.IVLDPSGSMNIYLVLDGSDSIGASN#FTGAK.K | 1 |
| IPI00019591 | K.ALQAVYSM*M*SWPDDVPPEGWN#R.T | 0.9768 |
| IPI00019591 | R.GSAN#RTCQVNGR.W | 0.5636 |
| IPI00019600 | K.INMNGIN#NSSGMVDAR.S | 0.5128 |
| IPI00019729 | S.RGCN#VSR.K | 0.6694 |
| IPI00019772 | R.HRAGMQN#LTEFIGSEPSKKRKR.R | 0.57 |
| IPI00019943 | F.TTCCTLSEEFACVDNLADLVFGELCGVNEN#R.T | 0.7473 |
| IPI00019943 | R.DIENFN#STQK.F | 1 |
| IPI00019943 | R.YAEDKFN#ETTEK.S | 1 |
| IPI00019943 | K.HN#FSHCCSK.V | 0.9818 |
| IPI00019981 | K.QNSDHSN#GSFNLKA.L | 0.9833 |
| IPI00019983 | R.TEAPEGTESEMETPSAINGN#PSWHLAD.S | 0.6169 |
| IPI00019989 | R.ALQWNAGSGGLPEN#ETTFARIL.Q | 0.6498 |
| IPI00020003 | R.RN#NSIRRN#NSSLMVPK.V | 0.8358 |
| IPI00020036 | K.LRWDPADYEN#VTSIR.I | 0.9655 |
| IPI00020078 | R.QFN#QTVQSSGN#MTDK.S | 0.5929 |
| IPI00020091 | V.PITN#ATLDR.I | 0.9855 |
| IPI00020091 | R.QNQCFYN#SSYLNVQR.E | 1 |
| IPI00020091 | K.SVQEIQATFFYFTPN#K.T | 1 |
| IPI00020091 | R.EN#GTVSR.Y | 0.9899 |
| IPI00020091 | R.NEEYN#K.S | 0.9747 |
| IPI00020094 | R.N#STELSEM*FPVLPGSH.L | 0.9587 |
| IPI00020122 | -.M*LVNGENFGVSLNIFPSVAIN#KSSGAPRR.V | 0.547 |
| IPI00020124 | K.DN#KSPLHLVQMPPVIVET.A | 0.8207 |
| IPI00020134 | R.QN#SSPHLPK.L | 0.9677 |
| IPI00020354 | R.N#TSPDTN#YTLYYWHR.S | 0.5808 |
| IPI00020366 | A.FNCPPN#STMNR.G | 0.8296 |
| IPI00020368 | R.QPGKAPN#FSVN#WTVGDSAIEVIN#ATTGK.D | 0.8377 |
| IPI00020396 | K.TGFTQLGTSCITN#HTCSNADETFCEMVK.S | 0.5834 |
| IPI00020407 | K.VDNLVVN#GTGTN#STN#STTAVPSLVALEK.I | 0.5666 |
| IPI00020416 | R.KQEEFDVANN#GSSQANK.L | 0.5453 |
| IPI00020426 | K.SPTSPTQNLFPASKTSPVNLPN#KSSI.P | 0.7398 |
| IPI00020501 | K.EIEN#LTQQYEEK.A | 0.8717 |
| IPI00020546 | R.MIEQYHN#HSDHYCLNLDSGM*VIDSYR.M | 0.5458 |
| IPI00020557 | R.INNGGCQDLCLLTHQGHVN#CSCR.G | 0.9991 |
| IPI00020557 | R.FN#STEYQVVTR.V | 0.9997 |
| IPI00020557 | R.M*HLN#GSNVQVLHR.T | 0.997 |
| IPI00020557 | R.ELQGN#CSRLGCQHHCVPTLDGPTCY.C | 0.8785 |
| IPI00020557 | K.DN#ATDSVPLRTGIGVQLKDIKVFNRDR.Q | 0.8689 |
| IPI00020557 | K.SDALVPVSGTSLAVGIDFHAEN#DTIYWVDMGLSTISRAK.R | 0.6213 |
| IPI00020586 | T.ELQLAAVETTANSLM*WILYN#LS.R | 0.6761 |
| IPI00020598 | R.ILKVAEFFN#YSKNR.I | 0.7997 |
| IPI00020692 | R.NSN#VSQASMSSR.M | 0.54 |
| IPI00020772 | T.GN#YTACQKDLCCHLTYKM*SEKR.T | 0.792 |
| IPI00020873 | K.WSPTGPATSNPN#SSIMLASASFDSTVR.L | 0.5122 |
| IPI00020903 | R.RRN#VSGNNGPFGQDKNIAM*TGQITSTKPKR.T | 0.5652 |
| IPI00020918 | K.AAHN#NSENIPLHK.S | 0.8707 |
| IPI00020966 | Y.N#QSTATTLFHSLPLLRYIFVRER.V | 0.9881 |
| IPI00020985 | M.GMNTGTNAGM*NPGMLAAGNGQGIMPNQVMN#GSIGAGR.G | 0.7024 |
| IPI00020986 | R.LSHNELADSGIPGNSFN#VSSLVELDLSYNK.L | 1 |
| IPI00020986 | K.LGSFEGLVN#LTFIHLQHNR.L | 1 |
| IPI00020986 | K.LHINHNN#LTESVGPLPK.S | 1 |
| IPI00020986 | K.AFEN#VTDLQWLILDHNLLENSK.I | 1 |
| IPI00020996 | R.YLSLRN#NSLR.T | 0.7943 |
| IPI00020996 | K.AGAFLGLTNVAVMN#LSGNCLR.N | 1 |
| IPI00020996 | R.FVQAICEGDDCQPPAYTYNN#ITCASPPEVVGLDLR.D | 0.9999 |
| IPI00020996 | K.ALRDFALQN#PSAVPR.F | 0.9955 |
| IPI00021089 | R.WLSSTGPECN#CSLGNFDSQVGACGFNSR.I | 0.8905 |
| IPI00021106 | K.AMAETFYLSNIVPQDFDN#NSGYWNR.I | 0.7649 |
| IPI00021131 | L.DLSM*NN#ISQLLPNPLPSLRFLEELRLAGNALTYIPK.G | 0.8889 |
| IPI00021131 | K.IHHIPDYAFGN#LSSLVVLHLHNNRIHSLGK.K | 0.5879 |
| IPI00021175 | K.EN#SSVEAKDSGLESK.K | 0.7359 |
| IPI00021175 | M.KTQEPAGSLEEN#NSDK.N | 0.6109 |
| IPI00021176 | K.TTTRQLSSPN#HSPSQSPN#QSPR.I | 0.6246 |
| IPI00021187 | R.AQTEGIN#ISEEALNHLGEIGTKTTLR.Y | 0.9365 |
| IPI00021250 | K.EIQHPNVITLHEVYEN#K.T | 0.5461 |
| IPI00021302 | K.VSM*M*EKSELVN#ETRWQYYGTAN#TSGN#LSLTWHVK.S | 0.6375 |
| IPI00021304 | R.FGGFGGPGGVGGLGGPGGFGPGGYPGGIHEVSVN#QSLLQPLNVK.V | 0.999 |
| IPI00021304 | R.M*SGDLSSN#VTVSVTSSTISSNVASK.A | 0.882 |
| IPI00021305 | K.VDEFN#VSSPQF.V | 0.7039 |
| IPI00021319 | M.QNNWCFPACSFN#GTSAQEWFM*AQDCPYRK.R | 0.5829 |
| IPI00021364 | K.N#VTFWGRPLPR.C | 0.9279 |
| IPI00021388 | R.CTCGFSAVM*NRKFGN#NSGLFLE.D | 0.6283 |
| IPI00021426 | R.M*LWEHN#STIIVMLTK.L | 0.641 |
| IPI00021426 | R.KVEVEPLN#STAVHVYWK.L | 1 |
| IPI00021477 | R.QNVYIPGSN#ATLTNAAGK.R | 0.8796 |
| IPI00021531 | R.N#PSASTFLHLSTNSFR.L | 0.9423 |
| IPI00021556 | R.MQSPQNLHGQQDDDSAAESFNGN#ET.L | 0.8236 |
| IPI00021557 | K.M*FLN#NTTTNRHTSGEGPGSKTGDKEE.K | 0.9548 |
| IPI00021578 | K.LGYNAN#TSVLSFQAVCR.E | 1 |
| IPI00021612 | K.TLPDSAGYVEGLQCM*SVEN#ATTIR.T | 0.5723 |
| IPI00021689 | K.EGKENTRITN#LTVNTGLDCSEK.T | 0.693 |
| IPI00021695 | K.EASDIILTDDN#FTSIVK.A | 0.8332 |
| IPI00021711 | R.SN#HTQATNDPPEVTVFPK.E | 0.5239 |
| IPI00021727 | K.DQYVEPEN#VTIQCDSGYGVVGPQSITCSGN#R.T | 0.9884 |
| IPI00021727 | R.FSLLGHASISCTVEN#ETIGVWR.P | 1 |
| IPI00021731 | M.KLGTEALSTN#HSVIVNSPVITAAINKEFSNK.V | 0.6088 |
| IPI00021731 | K.QSESSFITGDIN#SSASLNREGLL.N | 0.909 |
| IPI00021753 | K.NEN#SSEQLDVDGDSSSEVSSEVNFNYEYAQM*EVTMK.A | 0.5242 |
| IPI00021786 | R.M*IEDAIRSHSESASPSALSSSPNN#LSPTGWSQPK.T | 0.5917 |
| IPI00021807 | R.M*ELSM*GPIQAN#HTGTGLLLTLQPEQK.F | 0.6119 |
| IPI00021817 | R.EVSFLN#CSLDNGGCTHYCLEEVGWR.R | 1 |
| IPI00021834 | R.YFYNN#QTK.Q | 0.9342 |
| IPI00021846 | P.ASSDFSDLNTQTN#WTK.S | 0.8431 |
| IPI00021885 | R.M*DGSLNFN#R.T | 0.7193 |
| IPI00021888 | R.VSGYLNLAADLAHN#FTDGLAIGASFRGGR.G | 0.7351 |
| IPI00021891 | K.DLQSLEDILHQVEN#K.T | 1 |
| IPI00021903 | D.NTLQQN#SSSN#ISYSNAMQK.E | 0.5195 |
| IPI00021935 | R.NGIALEILQN#TSYLPVLEGQALR.L | 0.7079 |
| IPI00021968 | G.GQSPASGN#VTGNSN#STFISSGQVMNFK.G | 0.8734 |
| IPI00021970 | R.SEHTGACNPCTEGVDYTN#ASNNEPSCFPCTVCK.S | 0.7994 |
| IPI00021997 | K.LN#ITNIWVLDYFGGPK.I | 0.9916 |
| IPI00021998 | K.CTLHFLTPGVN#NSGSYICRPKMIK.S | 0.8551 |
| IPI00021998 | R.RKFVCFVQNSIGN#TTQSVQLKEK.R | 0.9146 |
| IPI00022072 | K.SEHN#PSTSGCSSDQSSK.V | 0.5193 |
| IPI00022080 | M.N#RSQFEELCAELLQK.I | 0.7362 |
| IPI00022080 | K.ELN#NTCEPVVTQPK.P | 0.9299 |
| IPI00022080 | K.NQQITHAN#NTVSNFKR.F | 0.616 |
| IPI00022200 | R.VAVVQHAPSESVDN#ASM*PPVK.V | 0.9999 |
| IPI00022215 | K.EHKAEKVPAVANYIMKIHN#FTSK.C | 0.5359 |
| IPI00022229 | K.FVEGSHN#STVSLTTK.N | 1 |
| IPI00022229 | R.FN#SSYLQGTNQITGR.Y | 1 |
| IPI00022229 | K.N#LTDFAEQYSIQDWAK.R | 1 |
| IPI00022229 | R.VNQNLVYESGSLN#FSK.L | 1 |
| IPI00022229 | K.QVLFLDTVYGN#CSTHFTVK.T | 1 |
| IPI00022229 | R.FEVDSPVYN#ATWSASLK.N | 1 |
| IPI00022229 | K.YNQN#FSAGNNENIM*EAH.V | 0.9997 |
| IPI00022229 | K.SSVITLNTNAELFN#QSDIVAHLLSSSSSVIDALQYK.L | 0.9997 |
| IPI00022229 | K.TIHDLHLFIENIDFN#K.S | 0.9993 |
| IPI00022229 | K.IQSPLFTLDANADIGN#GTTSANEAGIAASITAK.G | 0.9989 |
| IPI00022229 | K.YDFN#SSMLYSTAK.G | 0.9986 |
| IPI00022229 | K.SYN#ETK.I | 0.9971 |
| IPI00022229 | K.QVFPGLNYCTSGAYSN#ASSTDSASYYPLTGDTR.L | 0.9936 |
| IPI00022229 | K.DFHSEYIVSASN#FTSQLSSQVEQFLHR.N | 0.9921 |
| IPI00022229 | A.EEEM*LEN#VSLVCPK.D | 0.985 |
| IPI00022229 | G.GN#TSTDHFSLR.A | 0.9798 |
| IPI00022229 | K.VHN#GSEILFSYFQDLVITLPFELR.K | 0.9723 |
| IPI00022229 | K.LYQLQVPLLGVLDLSTNVYSNLYN#WSASYS.G | 0.5051 |
| IPI00022250 | R.ALKGETVN#TTISFSFKGIKFSKGK.Y | 0.6772 |
| IPI00022255 | K.LN#DTTLQVLNTWYTK.Q | 0.8462 |
| IPI00022286 | A.HAASTEEKEAGVGN#GTCAPVR.L | 0.8239 |
| IPI00022296 | R.SLYGKEDN#DTLVR.C | 0.9917 |
| IPI00022296 | R.TFTDKWEDYPKSEN#ESNIR.Y | 1 |
| IPI00022296 | K.QISESTNHIYSNLAN#CSPNRQK.P | 0.8465 |
| IPI00022314 | K.FNGGGHIN#HSIFWTN#LSPN.G | 0.6848 |
| IPI00022325 | K.VQGLVPAGGSSSN#STR.E | 0.9971 |
| IPI00022325 | R.QNM*CPAHQN#RSL.A | 0.8074 |
| IPI00022331 | R.M*AWPEDHVFISTPSFN#YTGR.D | 1 |
| IPI00022331 | R.QPQPVHLLPLHGIQHLNMVFSN#LTLEHINAILLGAYR.Q | 0.9557 |
| IPI00022331 | K.AELSN#HTRPVILVPGCLGNQLEAK.L | 0.5521 |
| IPI00022371 | R.VEN#TTVYYLVLDVQESDCSVLSR.K | 1 |
| IPI00022371 | R.VIDFN#CTTSSVSSALANTK.D | 1 |
| IPI00022371 | R.HSHNN#NSSDLHPHK.H | 0.9976 |
| IPI00022375 | M.LGGYGHISSSIDIN#SSR.K | 0.8028 |
| IPI00022391 | R.ESVTDHVNLITPLEKPLQN#FTLCFR.A | 1 |
| IPI00022392 | R.NPPM*GGNVVIFDTVITNQEEPYQN#HSGR.F | 1 |
| IPI00022395 | R.FSYSKN#ETYQLFLSYSSK.K | 1 |
| IPI00022395 | R.AVN#ITSENLIDDVVSLIR.G | 1 |
| IPI00022417 | A.VEFFN#LTHLPANLLQGASK.L | 0.997 |
| IPI00022417 | K.LPPGLLAN#FTLLR.T | 1 |
| IPI00022417 | R.DGFDISGNPWICDQN#LSDLYR.W | 1 |
| IPI00022417 | K.MFSQN#DTR.C | 0.9952 |
| IPI00022417 | R.QLDMLDLSN#NSLASVPEGLWASLGQPNWDMR.D | 0.6558 |
| IPI00022418 | F.LYNNHN#YTDCTSEGR.R | 0.9808 |
| IPI00022418 | K.LDAPTNLQFVN#ETDSTVLVR.W | 1 |
| IPI00022418 | R.DQCIVDDITYNVN#DTFHK.R | 1 |
| IPI00022418 | S.PGLEYN#VSVYTVK.D | 0.9975 |
| IPI00022418 | R.HEEGHMLN#CTCFGQGR.G | 0.9938 |
| IPI00022426 | T.PPDNIQVQENFN#ISR.I | 1 |
| IPI00022426 | R.YFYN#GTSMACETFQYGGCMGNGNNFVTEK.E | 0.9996 |
| IPI00022426 | K.WN#ITM*ESYVVHTNYDEYAIFLTK.K | 0.9955 |
| IPI00022429 | I.TN#ATLDQITGK.W | 0.5341 |
| IPI00022429 | R.QDQCIYN#TTYLNVQR.E | 1 |
| IPI00022429 | R.EN#GTISR.Y | 0.887 |
| IPI00022430 | M.FVMGVNENDYNPGSM*NIVSN#ASCTTNCLAPLAK.V | 0.6785 |
| IPI00022431 | K.VCQDCPLLAPLN#DTR.V | 1 |
| IPI00022431 | K.AALAAFNAQNN#GSNFQLEEISR.A | 1 |
| IPI00022432 | K.ALGISPFHEHAEVVFTAN#DSGPR.R | 1 |
| IPI00022447 | K.IILNALVAQQKN#GSPAGGDAKELDSKSK.G | 0.824 |
| IPI00022447 | K.KNNLPFLTN#VTLPR.S | 0.5774 |
| IPI00022461 | W.NLNN#DTEVPTASVAIEGASALNRVR.W | 0.5787 |
| IPI00022462 | K.LAVDEEENADN#NTKAN#VTK.P | 0.5547 |
| IPI00022462 | K.DFEDLYTPVN#GSIVIVR.A | 1 |
| IPI00022462 | R.KQNNGAFN#ETLFR.N | 0.9963 |
| IPI00022463 | K.CGLVPVLAENYN#K.S | 1 |
| IPI00022463 | R.QQQHLFGSN#VTDCSGNFCLFR.S | 1 |
| IPI00022471 | R.EDGDGDEDGPAQQLSGFNTN#QSNNVLQAPLPPMR.L | 0.5492 |
| IPI00022479 | R.QSLTSPDSQSARPAN#RTALSDPSSR.L | 0.5326 |
| IPI00022479 | M.CQELETGIVDLLIPSPN#ATAEVGYNR.D | 0.804 |
| IPI00022488 | R.CSDGWSFDATTLDDN#GTMLFFK.G | 0.9981 |
| IPI00022488 | K.ALPQPQN#VTSLLGCTH.- | 1 |
| IPI00022488 | R.SWPAVGN#CSSALR.W | 1 |
| IPI00022488 | R.N#GTGHGN#STHHGPEYM*R.C | 0.9993 |
| IPI00022525 | A.MNEPQCFYN#ESIAFFYN#R.S | 0.9212 |
| IPI00022529 | K.N#LSDVNILHR.L | 0.5671 |
| IPI00022557 | R.GYPGQVCAN#DSDTLELPDSSRALLLGWVPTR.L | 0.8556 |
| IPI00022579 | R.AVFIQGAEEHPAAFCYQVN#GSCPR.T | 0.5777 |
| IPI00022608 | R.VEGLQGVYIATLIN#GSMNEENM*RSVITFDK.G | 0.7377 |
| IPI00022608 | S.LLCLPKAN#NSR.S | 0.6448 |
| IPI00022609 | L.KRKWNSLSVIPVLN#SSSYTK.E | 0.5925 |
| IPI00022643 | K.ELLLTLDDSFNDVGSDNSN#QSSPRLRLPSPSMDK.I | 0.7513 |
| IPI00022674 | R.SVNILFN#LTHR.V | 0.999 |
| IPI00022674 | F.EN#LTYNQAASDSGSCGHVPVSPK.A | 0.9785 |
| IPI00022674 | Q.N#FTTLEAAPSEAPDVWR.I | 0.9323 |
| IPI00022731 | K.ELLETVVN#R.T | 0.9883 |
| IPI00022733 | K.EGHFYYN#ISEVK.V | 1 |
| IPI00022733 | R.IYSN#HSALESLALIPLQAPLK.T | 1 |
| IPI00022733 | K.VSN#VSCQASVSR.M | 0.9999 |
| IPI00022733 | R.GAFFPLTERN#WSLPNR.A | 0.999 |
| IPI00022733 | K.VTELQLTSSELDFQPQQELM*LQITN#ASLGLR.F | 0.9888 |
| IPI00022792 | R.VDLEDFEN#NTAYAK.Y | 0.8906 |
| IPI00022808 | R.VGSSPKIN#VSPFYQN#QTSTQR.S | 0.837 |
| IPI00022850 | K.VWKKIGIWNSNSGLN#MTDSNK.D | 0.7854 |
| IPI00022892 | K.DEGTYTCALHHSGHSPPISSQN#VTVLR.D | 0.8764 |
| IPI00022895 | H.N#ISVADSAN#YSCVYVDLKPPFGGSAPSER.L | 1 |
| IPI00022895 | R.EGDHEFLEVPEAQEDVEATFPVHQPGN#YSCSYR.T | 1 |
| IPI00022895 | R.FQSPAGTEALFELHN#ISVAD.S | 0.9998 |
| IPI00022895 | L.AN#VTLTCQAR.L | 0.961 |
| IPI00022933 | K.M*RMATPLLMQALPM*GALPQGPMQN#ATKYGN#MTE.D | 0.9428 |
| IPI00022933 | R.MATPLLMQALPMGALPQGPM*QN#ATK.Y | 0.9613 |
| IPI00022937 | R.QFYVAAQGISWSYRPEPTN#SSLN#LSVTSFK.K | 0.9497 |
| IPI00022937 | K.VSAITLVSATSTTAN#M*TVGPEGK.W | 1 |
| IPI00022937 | K.NSVLN#SSTAEHSSPYSEDPIEDPLQPDVTGIR.L | 1 |
| IPI00022937 | K.NM*ASRPYSIYPHGVTFSPYEDEVN#SSFTSGR.N | 1 |
| IPI00022937 | R.TNIN#SSRDPDNIAAWYLR.S | 1 |
| IPI00022937 | K.TYEDDSPEWFKEDNAVQPN#SSYTYVWHATER.S | 0.9214 |
| IPI00022937 | M.DNVGTWMLTSMN#SSPR.S | 0.7819 |
| IPI00023014 | R.M*EACM*LN#GTVIGPGK.T | 0.9997 |
| IPI00023014 | R.TEPM*QVALHCTN#GSVVYHEVLNAM*ECK.C | 1 |
| IPI00023014 | R.HCDGN#VSSCGDHPSEGCFCPPDK.V | 0.9999 |
| IPI00023014 | K.TTCNPCPLGYKEEN#NTGECCGR.C | 0.9991 |
| IPI00023014 | K.GQVYLQCGTPCN#LTCR.S | 0.9986 |
| IPI00023014 | R.GLQPTLTNPGECRPN#FTCACR.K | 0.9829 |
| IPI00023014 | K.WN#CTDHVCDATCSTIGM*AH.Y | 0.8999 |
| IPI00023019 | R.LDVDQALN#R.S | 0.9997 |
| IPI00023019 | R.SHEIWTHSCPQSPGN#GTDASH.- | 1 |
| IPI00023100 | R.TGGIGDSRPPSFHPNVASSRDGMDN#ETGTESMVSHR.R | 0.6243 |
| IPI00023109 | R.TILEN#NSGRSNSNPFNKEELTAILK.F | 0.7956 |
| IPI00023118 | -.MGLN#TSASTFQLTGFPGMEK.A | 0.9007 |
| IPI00023183 | K.N#WTAALFTGNLLLAR.D | 0.5026 |
| IPI00023186 | K.EATN#TTSEPSAPSQDLLDLSPSPR.M | 0.8169 |
| IPI00023212 | K.AMILLN#SSMYPLVTATQ.D | 0.7868 |
| IPI00023217 | K.DM*VVM*LLSM*LEGNVVN#GTIGK.Q | 0.9428 |
| IPI00023217 | Q.KAMFDHLSYLLEN#SSVGLASPAM*R.G | 0.5504 |
| IPI00023237 | -.MSYQLYNYPN#KTLLFSK.H | 0.7534 |
| IPI00023246 | K.VAGSEEN#GTAETEEVEDESASGELDLEAQFHLH.F | 0.5677 |
| IPI00023258 | K.AENSAAVQIN#LSPTM*LENVK.K | 0.5821 |
| IPI00023312 | R.EDFHYN#DTAGYFIIGGSRYVAGIEGFFGPLK.Y | 0.6552 |
| IPI00023314 | R.EQECEIISFAETGLSTIN#QTR.L | 0.9485 |
| IPI00023315 | R.YDPFPAGDPEPRAAPN#NSADPRV.R | 0.9586 |
| IPI00023339 | K.K.KPSMPN#VSNDLSQKLYATM*EKHK.E | 0.52 |
| IPI00023339 | R.NQQTILGSPASGIQNTIGSVGTGQQN#AT.S | 0.5983 |
| IPI00023340 | R.MTQPMM*N#SSYHSNPAYMN#QTAQYPMQM.Q | 0.5611 |
| IPI00023412 | N.N#YTAVFLGTVNGR.L | 0.5886 |
| IPI00023502 | R.YTSAGISVTVKELFPAPVLN#ASVTSP.L | 0.6911 |
| IPI00023586 | K.VADRTKSENGLQN#ESLSSTHHTDGLSK.I | 0.6943 |
| IPI00023586 | R.NHETTN#LSIQQK.R | 0.6117 |
| IPI00023648 | R.FQAFAN#GSLLIPDFGK.L | 0.9988 |
| IPI00023648 | K.SLDLSHNLISDFAWSDLHN#LSALQLLK.M | 0.9995 |
| IPI00023673 | K.GLN#LTEDTYKPR.I | 0.9999 |
| IPI00023673 | K.EPGSN#VTMSVDAECVPM*VR.D | 1 |
| IPI00023673 | R.TVIRPFYLTN#SSGVD.- | 1 |
| IPI00023673 | R.ALGFEN#ATQALGR.A | 1 |
| IPI00023673 | K.AAIPSALDTN#SSK.S | 0.9996 |
| IPI00023673 | R.DAGVVCTN#ETR.S | 0.9987 |
| IPI00023722 | R.LLPILSQQSTIN#LSHNPLDCTCSNIHFLTWYK.E | 0.798 |
| IPI00023722 | T.FSRLM*N#LTFLDLTR.C | 0.7961 |
| IPI00023768 | K.FLALVTMN#QSGWGTSGR.R | 0.5767 |
| IPI00023785 | R.GLDVEDVKFVINYDYPN#SSEDYVHRIGR.T | 0.9016 |
| IPI00023807 | K.NLLIFN#LSEGDSGVYQ.C | 0.989 |
| IPI00023814 | R.TLSDVPSAAPQN#LSLEVR.N | 0.9998 |
| IPI00024036 | M.APMN#QSQVLM*SGSPLELNSLGEEQR.I | 0.5572 |
| IPI00024046 | K.ANYNLPIM*VTDSGKPPM*TN#ITDLR.V | 0.9979 |
| IPI00024046 | K.IN#NTHALVSLLQNLNK.A | 0.6016 |
| IPI00024067 | K.FDVN#TSAVQVLIEHIGNLDR.A | 0.8201 |
| IPI00024089 | -.MACLM*AAFSVGTAMN#ASSYSAEMTEPK.S | 0.6233 |
| IPI00024151 | M.AVRGLIRPMN#KSPM*LITGIR.C | 0.5572 |
| IPI00024163 | R.FRGN#LSGKRVDFSGR.T | 0.8261 |
| IPI00024214 | R.KDEN#ESSAPADGEGGSELQPK.N | 0.5864 |
| IPI00024278 | K.SSLLLAILGEMQTLEGKVHWSNVN#ESEPSFEATR.S | 0.674 |
| IPI00024282 | K.M*N#DSNSAGAGGPVKITEN#RSK.K | 0.7826 |
| IPI00024284 | R.NLHQSN#TSR.A | 0.9647 |
| IPI00024289 | I.WCEDFLVRSFYLKNLQTN#ETR.T | 0.76 |
| IPI00024289 | K.AENSHSHSDYIN#ASPIMDHDPR.N | 0.7796 |
| IPI00024292 | R.CIPQSWVCDGDVDCTDGYDENQN#CTRR.T | 0.5367 |
| IPI00024292 | K.YDGSNRQTLVN#TTHRPFD.I | 0.8456 |
| IPI00024316 | R.HN#LSLHSKFIKVHNEATGK.S | 0.6199 |
| IPI00024316 | R.NAWGN#QSYAELISQAIE.S | 0.6386 |
| IPI00024330 | R.DGTLEYAPVDITVNLDASGSQCGLHSPLQSDN#ATDSPK.S | 0.6181 |
| IPI00024344 | K.IIKSLQKN#GSVVAM*TGDGVNDAVALKAADIGVAMGQT.G | 0.9981 |
| IPI00024357 | M.ALYHN#ISGVGLFLHPVGLELLLDHR.A | 0.7441 |
| IPI00024382 | R.NTGN#GTQSSM*GSPLTR.P | 0.6092 |
| IPI00024403 | -.M*AAQCVTKVALN#VSCANLLDKDIGSK.S | 0.5908 |
| IPI00024425 | V.HSDFTAAATRGAM*AVIDGNVM*AIN#PSEETK.M | 0.8108 |
| IPI00024467 | K.IKGIVENMGINANN#M*SDFIM*KVDALMSSVPK.R | 0.71 |
| IPI00024519 | K.MLAQKSGNIIN#M*SSVASSVK.G | 0.7651 |
| IPI00024617 | K.YLCIPAADSPSQN#LTR.H | 0.9154 |
| IPI00024619 | K.CLKNEYVEN#RTK.S | 0.7714 |
| IPI00024684 | M.FNQDIEKLVEGEEVVREN#ETR.L | 0.7901 |
| IPI00024684 | K.HFGEFFNLN#QTVQSTIEDIK.V | 0.8074 |
| IPI00024726 | K.LENSKN#GTAGLIPSPELQEWR.V | 0.7954 |
| IPI00024769 | R.RTEKLFFTILSPN#QSK.P | 0.8668 |
| IPI00024787 | K.YN#VTVIQYIGELLR.Y | 0.6148 |
| IPI00024802 | R.LMPLEAGIPDPPN#MSAELIQLKAK.ER.H | 0.8143 |
| IPI00024816 | P.HM*LPEDGAN#LSSARGILSLIQSSTR.R | 0.6406 |
| IPI00024825 | R.N#GTLVAFR.G | 0.992 |
| IPI00024825 | K.MTSTMPELN#PTSRIAEAM*LQTTTR.P | 0.7371 |
| IPI00024842 | K.DN#SSLNPLDRLISEDKKEK.M | 0.8154 |
| IPI00024887 | R.RQQSRN#R.S | 0.8613 |
| IPI00024896 | K.IKNMN#STLTFVTLSGELRAR.R | 0.7423 |
| IPI00024911 | R.QALLKQGQDN#LSSVKETQK.K | 0.5629 |
| IPI00024933 | K.NIKHSGN#ITFDEIVNIAR.Q | 0.9525 |
| IPI00024970 | A.KEAAGASKALN#V.T | 0.8369 |
| IPI00024970 | R.VLAPILPDN#FSTPTGSR.T | 0.5501 |
| IPI00024975 | K.TFTMMGPSESDN#FSHNLR.G | 0.5064 |
| IPI00025054 | M.EPGN#GSLDLGGDSAGR.S | 0.6398 |
| IPI00025073 | K.ENEEFLIGFN#ITSKGRQLPKR.R | 0.6998 |
| IPI00025076 | M.DNPFEFNPEDPIPVSFSPVDTN#STSGDPVEKK.D | 0.9351 |
| IPI00025092 | E.APM*FTQPLVNTYAIAGYN#ATLN#CSVR.G | 0.6144 |
| IPI00025110 | R.KWN#VTSLETLK.A | 0.7974 |
| IPI00025158 | M.KM*YSDAFLN#DSYLK.Y | 0.5533 |
| IPI00025193 | R.LQEM*GFIIYGNEN#ASVVPLLLYMPGK.V | 0.8126 |
| IPI00025264 | R.EKTSLSANN#ATLEKQLIELTRTNELLKSK.F | 0.7759 |
| IPI00025276 | R.GLRGPN#LTSPASITFTTGLEAPR.D | 1 |
| IPI00025310 | K.NCRN#KSLLRSRR.T | 0.7196 |
| IPI00025310 | K.RPETKLKPLPVAPSQPTLGSSNIN#GSIDYPAK.N | 0.5894 |
| IPI00025333 | R.KACKN#CTCGLAEELEK.E | 0.6207 |
| IPI00025426 | N.YLN#ETQQLTQEIK.A | 0.9924 |
| IPI00025426 | K.TFSSM*TCASGAN#VSEQLSLK.L | 1 |
| IPI00025426 | K.KGCVLLSHLN#ETVTVSASLESGR.E | 1 |
| IPI00025426 | K.GCVLLSHLN#ETVTVSASLESGREN#R.S | 0.5814 |
| IPI00025465 | R.VIHLQFNNIASITDDTFCKAN#DTSYIR.D | 0.971 |
| IPI00025468 | -.M*ENLQTN#FSLVQGSTK.K | 0.5035 |
| IPI00025477 | M.IFDFYKQN#KTTR.D | 0.5184 |
| IPI00025477 | K.TAN#SSPIHFAGAQTSLPAFSPGR.L | 0.7326 |
| IPI00025489 | K.TLIPN#ASNEAIQLM*TEM*LNWDPK.K | 0.5307 |
| IPI00025489 | -.M*NRYTTM*RQLGDGTYGSVLMGKSN#ESGELVAIKR.M | 0.5123 |
| IPI00025616 | R.FLGTSGQN#VSDIFR.Y | 0.9973 |
| IPI00025700 | R.SLHN#LSTPEVPASVQTVTIESSVTVKIENKESR.E | 0.9517 |
| IPI00025753 | M.ATFAGQIEENSNANTLVM*ILN#ATDADEPNNLNSK.I | 0.7385 |
| IPI00025786 | K.QEN#SSN#SSPAPEPNSAVPSDGTEAK.V | 0.793 |
| IPI00025788 | K.RKN#STSSTSN#SSAGNNAN#STGSKK.K | 0.5861 |
| IPI00025815 | M.MGM*LASQQN#QSGPSGNNQNQGNMQR.E | 0.6898 |
| IPI00025852 | K.ELYEPIWQN#FTDPQLR.R | 0.9999 |
| IPI00025861 | L.TFPN#SSPGLRR.Q | 0.666 |
| IPI00025862 | K.TLFCN#ASK.E | 0.984 |
| IPI00025862 | R.LGHCPDPVLVNGEFSSSGPVN#VSDK.I | 1 |
| IPI00025862 | K.EWDN#TTTECR.L | 0.9996 |
| IPI00025862 | R.DCDPPGNPVHGYFEGNN#FTLGSTISYYCEDR.Y | 0.9962 |
| IPI00025864 | R.GM*N#LTVFGGTVTAFLGIPYAQPPLGR.L | 1 |
| IPI00025864 | K.YGNPN#ETQN#NSTSWPVFK.S | 1 |
| IPI00025864 | R.DN#YTKAEEILSR.S | 1 |
| IPI00025864 | K.WSDIWN#ATK.Y | 0.9996 |
| IPI00025864 | K.DN#NSIITR.K | 0.9939 |
| IPI00025864 | K.N#ATVLIWIYGGGFQTGTSSLHVYDGK.F | 0.7544 |
| IPI00025864 | R.EN#ETEIIK.C | 0.6817 |
| IPI00025879 | K.VKN#LTEEMAGLDETIAKLTK.E | 0.7899 |
| IPI00025879 | R.QAEEAEEQSNVN#LSK.F | 0.9989 |
| IPI00025879 | R.EN#QSILITGESGAGK.T | 0.9959 |
| IPI00026029 | R.SVRKN#LTYSCRSNQDCIINK.H | 0.9277 |
| IPI00026089 | K.LLLKIKN#GTPPM*R.K | 0.561 |
| IPI00026108 | M.KN#VSHNPLLLLTPQKVK.R | 0.643 |
| IPI00026157 | R.IRTYN#FTQDRVSDHRIAYEVR.D | 0.747 |
| IPI00026157 | N.RNCILHLLSKN#WSR.R | 0.6247 |
| IPI00026201 | A.ETTLTQSPAFM*SATPGDKVN#ISCK.A | 0.9996 |
| IPI00026240 | K.DSSGVIHVMLN#GSEPTGAYPIK.G | 0.7287 |
| IPI00026270 | M.HGDETVGRELLLHLIDYLVTSDGKDPEITNLIN#STR.I | 0.6956 |
| IPI00026327 | K.NQELKAGTSIMGSHLTSAETVTLDSLKAVEVVN#LSVS.C | 0.5498 |
| IPI00026466 | K.LSTLLNHNN#DTEEEER.L | 0.6877 |
| IPI00026631 | D.EAKNN#ITIFTRILDRLLDGYDNR.L | 0.6508 |
| IPI00026638 | R.STEEPTAPASPQPPN#DSR.L | 0.5892 |
| IPI00026638 | A.N#RTGSVEAQTALKK.R | 0.6591 |
| IPI00026639 | R.LSYNVIPLN#LTLDNRVADQLWVP.D | 0.8409 |
| IPI00026647 | R.FLITHN#PTN#ATLSTFIEDLK.K | 0.9108 |
| IPI00026659 | M.YFFLAN#LSLADACFVSTTVPK.M | 0.8187 |
| IPI00026673 | R.EQLSSAN#HSLQLASQIQK.A | 0.6035 |
| IPI00026813 | Q.RYFVISN#TTGYNDR.A | 0.7041 |
| IPI00026828 | L.EECCTHN#NSATLSWK.Q | 0.8658 |
| IPI00026885 | M.ILN#SSTEDGIKR.I | 0.7889 |
| IPI00026885 | K.SHSN#LSTKMSTLSYRPSDN#VSSSTK.K | 0.5691 |
| IPI00026975 | L.DCPSSIIGMGLGN#ASTGYGK.I | 0.8383 |
| IPI00026987 | M.QRLNIGYVIN#VTTHLPLYHYEK.G | 0.9563 |
| IPI00026993 | G.DSSHCSN#ASTHSNQEAGPSNKR.T | 0.7712 |
| IPI00027035 | F.EAFQDALNQETTYVSN#LTR.S | 0.914 |
| IPI00027086 | M.SACN#ISIQGPSIYNK.E | 0.7837 |
| IPI00027087 | R.YFCLAANDQNN#VTIM*AN.L | 0.6509 |
| IPI00027146 | K.INPKN#YTENELEKITR.R | 0.6551 |
| IPI00027174 | R.M*DKPAN#CTHDLYMIM*R.E | 0.5864 |
| IPI00027178 | R.EGVQLN#LSFIR.P | 0.783 |
| IPI00027195 | V.NALN#FSVN#YSEDFVELNAAR.Y | 0.9366 |
| IPI00027200 | R.GSHAGN#LTVAVVLPLAN#TSYPWSWARVGPAVELALAQVK.A | 0.9747 |
| IPI00027220 | K.IHQGTLTILSLN#SSLLGYYQCLAN#NSIGAIVS.G | 0.8917 |
| IPI00027235 | K.AATCINPLN#GSVCERPAN#HSAK.Q | 0.9999 |
| IPI00027235 | R.YLHTAVIVSGTMLVFGGNTHN#DTSM*SHGAK.C | 1 |
| IPI00027235 | K.AATCINPLN#GSVCER.P | 1 |
| IPI00027235 | K.M*PSQAPTGNFYPQPLLN#SSM*CLEDSR.Y | 1 |
| IPI00027235 | K.ISN#SSDTVECECSENWK.G | 1 |
| IPI00027235 | R.VFHIHN#ESWVLLTPK.A | 1 |
| IPI00027235 | K.IDSTGN#VTNELR.V | 1 |
| IPI00027235 | R.N#HSCSEGQISIFR.Y | 0.9999 |
| IPI00027235 | R.YN#WSFIHCPACQCNGHSK.C | 0.9999 |
| IPI00027235 | R.GICN#SSDVR.G | 0.9996 |
| IPI00027235 | R.NHPN#ITFFVYVSN#FTWPIK.I | 0.9982 |
| IPI00027235 | K.CIN#QSICEK.C | 0.9913 |
| IPI00027235 | R.GCSCFSDWQGPGCSVPVPAN#QSFWTR.E | 0.9717 |
| IPI00027235 | K.AVVNGNIMWVVGGYMFN#HSDYNMVLAYDLASR.E | 0.9159 |
| IPI00027235 | K.CIN#QSICEKCEN#LTTGK.H | 0.6417 |
| IPI00027242 | Q.RHAAEIAN#MSLDILSAVGTFRMRHMPEVPVR.I | 0.9484 |
| IPI00027259 | K.N#NSPGTAEGCGGGGGGGGGGGSGGSGGGGGGGGGGDK.S | 0.9968 |
| IPI00027269 | R.LGSTFSLDTSMSMN#SSPLVGPECDHPK.I | 0.7599 |
| IPI00027310 | R.VN#STELFHVDR.H | 0.9983 |
| IPI00027310 | R.ALLTN#VSSVALGSR.R | 0.9989 |
| IPI00027341 | R.EVQGN#ESDLFM*SYFPR.G | 0.6737 |
| IPI00027377 | R.TVYLYPN#QTGLPDPLSR.H | 1 |
| IPI00027410 | R.ISALGLPTN#LTHILLFGM*GR.G | 1 |
| IPI00027410 | R.N#LSSLESVQLDHNQLETLPGDVFGALPR.L | 1 |
| IPI00027410 | K.LLDLSGNN#LTHLPK.G | 0.9931 |
| IPI00027412 | R.LQLSNGN#MTLTLLSVKR.N | 0.7565 |
| IPI00027422 | G.QTCN#CSTGSLSDIQPCLR.E | 0.5268 |
| IPI00027444 | K.LEESYTLNSDLARLGVQDLFN#SSK.A | 0.976 |
| IPI00027473 | L.WLALDYVVSN#ASVMNLLIISFDR.Y | 0.526 |
| IPI00027474 | M.AN#FTPVN#GSSGN#QSVR.L | 0.9558 |
| IPI00027482 | K.AVLQLNEEGVDTAGSTGVTLN#LTSK.P | 0.9994 |
| IPI00027482 | R.AQLLQGLGFN#LTER.S | 1 |
| IPI00027482 | D.PNAAYVN#M*SNHHR.G | 1 |
| IPI00027482 | K.VTISGVYDLGDVLEEMGIADLFTNQAN#FSR.I | 0.9995 |
| IPI00027482 | N.YVGN#GTVFFILPDK.G | 0.9813 |
| IPI00027493 | K.DASSFLAEWQN#ITK.G | 1 |
| IPI00027493 | K.SLVTQYLN#ATGNR.W | 1 |
| IPI00027504 | R.AFGSNPN#LTK.V | 0.9987 |
| IPI00027504 | K.LYLGSNN#LTALHPALFQN#LSK.L | 1 |
| IPI00027504 | R.NAITHLPLSIFASLGN#LTF.L | 1 |
| IPI00027504 | R.QGSLGLQYN#ASQEWDLR.R | 0.9999 |
| IPI00027504 | N.IFSN#LTSLGK.L | 0.9416 |
| IPI00027507 | K.LGYNAN#TSILSFQAVCR.E | 0.9999 |
| IPI00027507 | K.FVQGN#STEVACHPGYGLPK.A | 1 |
| IPI00027508 | R.STLITVLN#ISEIESR.F | 0.75 |
| IPI00027508 | K.WN#GSVIDEDDPVLGEDYYSVENPANKR.R | 0.5759 |
| IPI00027534 | K.SISWDEN#GTCIVINE.E | 0.8155 |
| IPI00027569 | -.MASN#VTNKM*DPHSM*NSR.V | 0.9216 |
| IPI00027642 | R.NTEASSEEESSASRMQVEQN#LSDH.I | 0.8298 |
| IPI00027666 | R.SN#SSAANLMAKK.R | 0.7236 |
| IPI00027682 | A.ASSIWSPASISPGSAPASVSVPEPLAAPSN#TSCM*QR.S | 0.8377 |
| IPI00027701 | R.GCASTGVIM*SVN#NSLYLGPILKFGSK.E | 0.7524 |
| IPI00027799 | R.N#GSANRN#SSHRTAAQPAETPEDVPGSLDDGADCEA.V | 0.962 |
| IPI00027803 | K.MLSLNN#YSVPQSTR.E | 0.5599 |
| IPI00027828 | -.M*NN#PSETSKPSM*ESGDGNTGTQTNGLDFQK.Q | 0.768 |
| IPI00027968 | K.KQPFSSASSQN#GSLSPHYLSSVIK.Q | 0.5436 |
| IPI00028030 | R.YRCN#DTIPEDYETHQLR.Q | 1 |
| IPI00028030 | R.CGPCPAGFTGN#GSHCTDVNECNAHPCFPR.V | 0.9891 |
| IPI00028119 | R.IYN#VTYLEPSLR.I | 0.5842 |
| IPI00028210 | K.GTGN#DTVLNVALLNVISNQECNIK.H | 1 |
| IPI00028277 | R.AAYN#VTLLNFMDPQK.M | 0.993 |
| IPI00028338 | R.VFYFMVGTAFAN#STCQLIVCQM*SSTR.C | 0.7299 |
| IPI00028382 | R.NGESMLN#ASLVN#ASSLSEAEQLQR.E | 0.9011 |
| IPI00028413 | K.TAFITN#FTLTIDGVTYPGNVK.E | 0.9995 |
| IPI00028413 | K.NAHGEEKEN#LTAR.A | 0.9994 |
| IPI00028448 | K.NLDLILPTLRN#YTVINSKIIVVTIR.P | 0.625 |
| IPI00028448 | R.FRDIPN#TSSMENPAPNK.N | 0.8805 |
| IPI00028448 | K.KDLSCSN#FSLLAYQFDHFSHEKIK.D | 0.8152 |
| IPI00028448 | M.FPKN#FTN#CTWTLENPDPTK.Y | 0.6661 |
| IPI00028490 | N.FGHN#DSTSQM*SLNSAAVTK.T | 0.6305 |
| IPI00028492 | R.MCQAGN#ATVKQSRYR.I | 0.5036 |
| IPI00028514 | K.KFLYN#FTQIPHLAGTEQNFQL.A | 0.5133 |
| IPI00028541 | R.KM*PSNQN#VSPSQR.D | 0.6196 |
| IPI00028570 | I.QAAASTPTN#ATAASDANTGDR.G | 0.9839 |
| IPI00028588 | K.NFHSMQNLCPPQTN#GTPEGR.Q | 0.6444 |
| IPI00028610 | K.SCVSNIESTLSALQYVSSIVVSLEN#R.S | 0.5546 |
| IPI00028642 | I.LESLM*CN#ESSMQSLRQR.K | 0.5424 |
| IPI00028928 | K.DGKN#KTDKKDHSNIGN#DSKKTDGTKQRS.H | 0.7479 |
| IPI00028931 | R.ERESFLAPSSGVQPTLAMPNIAVGQN#VTVTER.V | 0.7219 |
| IPI00028952 | D.KMIENHN#ISTPFSCQFCK.E | 0.5917 |
| IPI00028957 | M.SNVEQALFARLLLQDPGNHLIN#MTSSTTLN#LSADR.D | 0.7777 |
| IPI00028987 | K.LIPFSPAVN#TSVSTVASTVAPMYAGDLR.T | 0.6633 |
| IPI00028987 | K.TRGRGAAN#DSTQFTVAGRMVKK.G | 0.6108 |
| IPI00029011 | C.IIQMQGN#STSIINPK.N | 0.5849 |
| IPI00029019 | R.RGGRFSAQGM*GTFNPADYAEPANTDDNYGN#SSGN.T | 0.5824 |
| IPI00029048 | R.FTLTQSEADADILFN#FSHFK.D | 0.7949 |
| IPI00029061 | K.EGYSN#ISYIVVNHQGISSR.L | 1 |
| IPI00029061 | K.VSEHIPVYQQEEN#QTDVWTLLN#GSK.D | 1 |
| IPI00029061 | K.CGN#CSLTTLK.D | 0.9955 |
| IPI00029061 | R.DQDPM*LNSN#GSVTVVALLQASCY.L | 0.6691 |
| IPI00029166 | R.FQGN#DTSPESFLLHNALAR.K | 0.6772 |
| IPI00029172 | K.WYLENVYPEM*RVYN#NTLTYGEVRNSK.A | 0.5181 |
| IPI00029178 | K.CEQSYGTN#SSDESGSFSEADSESCPVQDR.G | 0.6131 |
| IPI00029193 | R.CFLGN#GTGYR.G | 0.9999 |
| IPI00029193 | K.YIPYTLYSVFN#PSDHDLVLIR.L | 1 |
| IPI00029193 | R.DSVSVVLGQHFFN#R.T | 1 |
| IPI00029260 | R.LRN#VSWATGR.S | 0.9999 |
| IPI00029260 | R.CMWSSALNSLN#LSFAGLEQVPK.G | 0.9515 |
| IPI00029268 | K.SPM*QWDN#SSNAGFSEASNTWLPTNSDYHTVNVDV.Q | 0.9545 |
| IPI00029273 | M.VSN#ESVDYRATFPEDQFPN#SSQN#GSCR.Q | 0.8522 |
| IPI00029273 | R.HVFPHN#HTADIQSEVH.C | 0.9993 |
| IPI00029324 | K.RNTELETLLAKLIQTCQHVEVN#ASR.Q | 0.8552 |
| IPI00029343 | R.NMANGQPHSVN#ITR.H | 0.6786 |
| IPI00029411 | R.IDSQLHTPMYFFLAN#LSFVDVCN#STTITPK.M | 0.7805 |
| IPI00029449 | K.SVTIQAPGEPLLDN#ESTR.G | 0.617 |
| IPI00029468 | M.ESYDVIANQPVVIDN#GSGVIK.A | 0.6352 |
| IPI00029533 | R.N#VTSNDEVLFN#VTVTMKK.C | 0.7091 |
| IPI00029591 | M.LRN#STDTTPLTGPGTPESTTVEPAARR.S | 0.906 |
| IPI00029643 | M.NKAGAVM*HSGM*QINM*QAKQN#SSKTTSKRR.G | 0.6042 |
| IPI00029643 | R.FHN#HTTHM*SLVGTFPWMAPEVIQSLPVSETC.D | 0.6596 |
| IPI00029728 | K.AVVVFDEAHNIDNVCIDSM*SVN#LTRR.T | 0.9764 |
| IPI00029739 | K.IPCSQPPQIEHGTIN#SSR.S | 1 |
| IPI00029739 | R.ISEEN#ETTCYMGK.W | 1 |
| IPI00029739 | K.SPDVIN#GSPISQK.I | 0.9999 |
| IPI00029739 | K.MDGASN#VTCINSR.W | 0.9995 |
| IPI00029739 | R.WDPEVN#CSM*AQIQLCPPPPQIPNSHN#MTTTLNYR.D | 0.9978 |
| IPI00029739 | R.SPYEMFGDEEVMCLNGN#WTEPPQCK.D | 0.9941 |
| IPI00029739 | K.LN#DTLDYECH.D | 0.99 |
| IPI00029739 | Y.YYGDSVEFN#CSESFTM*IGHR.S | 0.941 |
| IPI00029751 | K.GTEWLVN#SSR.I | 0.7866 |
| IPI00029751 | K.GTEWLVN#SSRILIWEDGSLEINN#ITR.N | 0.8616 |
| IPI00029768 | K.IN#NSTNEGM*NVK.K | 0.6256 |
| IPI00029778 | R.RSN#VSSPATPTASSSSSTTPTR.K | 0.5124 |
| IPI00029863 | H.LALGAQN#HTLQR.L | 0.9987 |
| IPI00029954 | K.VSKN#DTEEESN#K.S | 0.5904 |
| IPI00030075 | R.LHVGNYN#GTAGDALRFNK.H | 0.6391 |
| IPI00030099 | R.GQGTASSGN#VSDLAQTVKTFDNLK.T | 0.6284 |
| IPI00030101 | R.GPSHPLDLGTSSPN#TSQIHWTPYR.A | 0.8037 |
| IPI00030153 | K.EQQPNDLLSVQFIDYGN#VSVVHTNK.I | 0.7133 |
| IPI00030241 | T.TDFCSVSTATPVPTAN#STAKPTVQPSPSTTSK.T | 0.6144 |
| IPI00030250 | K.TNLIVNYLPQN#MTQEELK.S | 0.7865 |
| IPI00030360 | R.EITASSAVSILIKPEQETDPLPVVSRN#VSADAK.C | 0.6648 |
| IPI00030380 | K.LQESIEYEDLGKN#NSVK.T | 0.9004 |
| IPI00030380 | R.LNVN#ATDSSSTSNHK.Q | 0.5921 |
| IPI00030393 | M.RSFLQQDVN#KTKSR.L | 0.6779 |
| IPI00030414 | R.EPSDPTSN#RSTFHPGDSQKPVK.R | 0.9579 |
| IPI00030418 | K.QTDVIN#ASWWVMSN#KTRDELER.S | 0.6331 |
| IPI00030536 | K.RN#SSSSSTDSETLRYNHNFEPK.S | 0.6821 |
| IPI00030572 | K.LPLSHSALPSQALGGIASGLGMQNLN#SS.R | 0.7686 |
| IPI00030572 | R.NNPVIQSSTTTN#TTTTTTTTTSN#TTHR.V | 0.6237 |
| IPI00030648 | R.GNEATEGSGLLLN#STGDLM*K.K | 0.6517 |
| IPI00030739 | R.FLLYN#R.S | 0.7531 |
| IPI00030739 | K.TELFSSSCPGGIMLN#ETGQGYQR.F | 0.9999 |
| IPI00030746 | K.FQDLLSEEN#ESTALPQVLAQPSTSRKR.P | 0.5888 |
| IPI00030790 | K.LSSQGN#VSGKRK.N | 0.5281 |
| IPI00030828 | R.DVLQNHLTEVLTLVAMELPHN#VSSAEAVLR.H | 0.9971 |
| IPI00030851 | K.KLN#CSPDSFR.C | 0.7295 |
| IPI00030868 | K.EDGKTLYANTIN#GSGLAID.R | 0.8024 |
| IPI00030871 | K.LLLSQLDSHPSHSAVVN#WTSYASSIEALSSGNK.E | 0.9997 |
| IPI00030871 | K.LTGVAGN#YTVCQK.D | 0.9998 |
| IPI00030875 | I.MYPIAVMGN#ITIILMSR.L | 0.6124 |
| IPI00030882 | K.VAKNAQNIN#PSSSQNSQNFATYK.E | 0.5715 |
| IPI00030882 | M.VVTLTELPSGN#DTSGLEN#KTVVVTTILESPYVMMKK.N | 0.9147 |
| IPI00030907 | R.IVAECNAVRQALQDLLSEYMN#NTGRK.E | 0.5831 |
| IPI00030907 | K.KN#ATM*LYTASQAFLRHPDVAATRANR.D | 0.557 |
| IPI00030930 | K.FIENIGYVLYGVYN#VTM*VVVLLNM*LIAM*IN#N.S | 0.5581 |
| IPI00030930 | K.TRYQAGMR.NSEN#LTAN#NTLSKPTR.Y | 0.8356 |
| IPI00030940 | R.LVKVKNEGDDFGWGVVVN#FSKK.S | 0.8263 |
| IPI00030986 | K.EEDFMQLSPQELISVISN#DSLNVEK.E | 0.7113 |
| IPI00031002 | K.N#VSQENMCSASAAFK.S | 0.885 |
| IPI00031002 | M.VAGLLNSGNSN#KTIHTSSSIK.L | 0.6624 |
| IPI00031023 | K.NM*LVLN#LSHNSIDTIPNQLFIN#LTDLLYLDLSENR.L | 0.6059 |
| IPI00031046 | M.M*N#NTDFLMLNNPWNK.L | 0.8844 |
| IPI00031064 | E.N#ITIVDISR.K | 0.5226 |
| IPI00031076 | R.IVN#DTYR.T | 0.9162 |
| IPI00031131 | R.AGPN#GTLFVADAYK.G | 0.9997 |
| IPI00031138 | R.RSLEQHGLPWAIISIPVN#VTSIPTFELLQPPWTFW.- | 0.8046 |
| IPI00031171 | R.SVQLHDSGN#YSCYR.A | 0.9963 |
| IPI00031282 | A.VAAGTPN#TSGSIHENPPK.A | 0.542 |
| IPI00031411 | R.FAN#LTPEEFVGDYWR.N | 0.9062 |
| IPI00031509 | V.ENLIILAN#NSLSSNGN#VTESGCK.E | 0.5445 |
| IPI00031522 | K.STKPIVAAIN#GSCLGGGLEVAISCQYR.I | 0.5098 |
| IPI00031556 | K.N#ATLVSPPAQTIN#QTPVTLQVPG.L | 0.9944 |
| IPI00031589 | R.CN#SSLSNHQR.I | 0.6205 |
| IPI00031595 | R.TASIWVPPLQERN#SSWDR.I | 0.5407 |
| IPI00031620 | L.GDQM*LN#ATVM*NHGDTLTATATATAR.A | 0.7552 |
| IPI00031620 | R.EN#LTVFSFLGPIVN#LSEPTAHEGSTVTVSC.M | 0.6788 |
| IPI00031658 | R.YVKTTGN#ATVDHLSK.Y | 0.5665 |
| IPI00031696 | K.LNYLPPN#ASALFR.K | 0.9459 |
| IPI00031710 | K.CVPVTLWHLGYWLCYVN#STVNPICYALCN#R.T | 0.6615 |
| IPI00031773 | M.SAAAM*GSGSGN#MSAGSMN#MSSYVGAGMSPSLAGM*S.P | 0.9983 |
| IPI00031789 | R.PTLLN#DTGN#YTCM*LR.N | 0.9637 |
| IPI00031801 | E.GEKGAEAAN#VTGPDGVPVEGSRYAADR.R | 0.5246 |
| IPI00031907 | K.IFQIYKGN#FTGSVEPEPSTLTPR.T | 0.6701 |
| IPI00032034 | K.DFLDVYYN#LTLKTM*MGIEW.V | 0.8857 |
| IPI00032038 | K.IN#RTLETANCMSSQTK.N | 0.5753 |
| IPI00032162 | A.M*IQFAIN#STERKR.M | 0.5121 |
| IPI00032179 | K.LGACN#DTLQQLMEVFK.F | 1 |
| IPI00032179 | K.SLTFN#ETYQDISELVYGAK.L | 1 |
| IPI00032179 | K.WVSN#KTEGR.I | 0.9915 |
| IPI00032190 | R.LALTPAHLLFTADN#HTEPAAR.F | 0.9997 |
| IPI00032215 | K.KLINDYVKN#GTR.G | 1 |
| IPI00032215 | N.SPLDEEN#LTQENQDR.G | 1 |
| IPI00032215 | K.YTGN#ASALFILPDQDK.M | 1 |
| IPI00032215 | K.ALDKNVIFSPLSISTALAFLSLGAHN#TTLTEILK.A | 0.9562 |
| IPI00032220 | R.VYIHPFHLVIHN#ESTCEQLAK.A | 1 |
| IPI00032220 | R.LQAILGVPWKDKN#CTSR.L | 1 |
| IPI00032220 | K.GFSLLAEPQEFWVDN#STSVSVPMLSGM*GTFQH.W | 0.8079 |
| IPI00032256 | R.GNEANYYSN#ATTDEHGLVQFSIN#TTNVM*GTSLTVR.V | 1 |
| IPI00032256 | K.VSN#QTLSLFFTVLQDVPVR.D | 1 |
| IPI00032256 | K.SLGNVN#FTVSAEALESQELCGTEVPSVPEHGR.K | 1 |
| IPI00032256 | K.GCVLLSYLN#ETVTVSASLESVR.G | 1 |
| IPI00032256 | K.IITILEEEMN#VSVCGLYTYGK.P | 1 |
| IPI00032256 | Y.VLDYLN#ETQQLTPEVK.S | 0.9998 |
| IPI00032256 | K.GCVLLSYLN#ETVTVSASLESVRGN#R.S | 0.9739 |
| IPI00032258 | R.N#PSDPM*PQAPALWIETTAYALLHLLLHEGK.A | 0.9655 |
| IPI00032258 | R.GLN#VTLSSTGR.N | 1 |
| IPI00032258 | R.FEQLELRPVLYNYLDKN#LTVSVH.V | 1 |
| IPI00032258 | R.FSDGLESN#SSTQFEVK.K | 1 |
| IPI00032258 | K.N#TTCQDLQIEVTVK.G | 0.9998 |
| IPI00032291 | K.VEGSSSHLVTFTVLPLEIGLHNIN#FSLETWFGK.E | 0.9986 |
| IPI00032291 | R.AN#ISHKDM*QLGR.L | 0.9982 |
| IPI00032291 | K.YN#FSFR.Y | 0.9944 |
| IPI00032292 | K.FVGTPEVN#QTTLYQR.Y | 1 |
| IPI00032299 | R.ILTN#FTGVM*PPQFK.K | 0.7638 |
| IPI00032328 | R.ITYSIVQTN#CSK.E | 1 |
| IPI00032328 | K.LNAENN#ATFYFK.I | 1 |
| IPI00032328 | K.YNSQN#QSNNQFVLYR.I | 1 |
| IPI00032328 | R.HGIQYFNN#NTQHSSLFMLNEVK.R | 0.9985 |
| IPI00032334 | R.VYVN#ISHPDMVDFARGK.T | 0.602 |
| IPI00032388 | R.DDNMN#TSEDEDMFPIEMSSDEAMELLESSR.T | 0.7408 |
| IPI00032402 | K.LM*QN#STSPPLK.L | 0.5598 |
| IPI00032402 | M.IQTAHVGVGISGNEGLQAAN#SSDYSIAQFK.Y | 0.5178 |
| IPI00032406 | R.YGEQGLREGSGGGGGMDDIFSHIFGGGLFGFMGN#QSR.S | 0.839 |
| IPI00032449 | K.NAKSSGN#SSSSGSGSGSTSAGSSSPGAR.R | 0.8221 |
| IPI00032461 | K.N#YTSVYDKNNLLTN#KTVMAHGCY.L | 0.5331 |
| IPI00032466 | K.LREQVNSMVDISKMHM*ILYDLQQN#LSSSHR.A | 0.9741 |
| IPI00032680 | R.CDKDSMPDGN#LSEEEK.L | 0.8587 |
| IPI00033017 | M.NWVVGSADLEIIN#ATTGR.R | 0.7931 |
| IPI00033102 | A.QPIEPITAAPSGSGN#GSGSSSSGGSSGGSGFCAVR.A | 0.6723 |
| IPI00033419 | R.VKN#ISDADVHNAM*DNYE.C | 0.8216 |
| IPI00033486 | R.KFAMSPSN#FSSSDCQDEEGR.K | 0.7204 |
| IPI00033486 | W.GKELIETLWNLGDHELLHMYPGN#VSK.L | 0.8142 |
| IPI00033583 | K.M*VAWSSSEN#MSEESVVLSFPR.F | 0.9582 |
| IPI00033583 | K.TFVEVDEN#GTQAAAATGAVVSERSLR.S | 0.5917 |
| IPI00033798 | K.SEVNEM*ENN#LTRR.R | 0.7871 |
| IPI00033946 | A.EAYLGYPVTNAVITVPAYFN#DSQR.Q | 0.7137 |
| IPI00034003 | K.SLTN#LSQEEQITKLLILK.L | 0.9128 |
| IPI00034277 | K.ATFVKVVPTPNN#GSTELVALHR.N | 0.5215 |
| IPI00034283 | M.ASTFIGN#STAIQELFK.R | 0.933 |
| IPI00034309 | L.ENSGRSKN#FSYNLQSATQPKN#K.T | 0.9674 |
| IPI00034317 | K.ALKSN#SSLTKGLRTMVEQNLMEK.L | 0.575 |
| IPI00034378 | K.EGGVFTFGAGGYGQLGHN#STSHEINPRK.V | 0.8953 |
| IPI00034558 | K.N#RSTASIQPTSDDLVSSAEC.S | 0.8906 |
| IPI00035165 | K.AYIHAQAEN#CSHTAELVSWK.R | 0.9374 |
| IPI00035691 | R.RDMGN#FSWGSE.C | 0.7735 |
| IPI00036554 | M.FRM*LN#SSFEDDPFFSESILAHRENM*R.Q | 0.6512 |
| IPI00037319 | K.SIMEN#ASAGVEHLLLGNK.C | 0.7305 |
| IPI00040730 | K.EKPPNENCNN#NSPESSLLPR.A | 0.9121 |
| IPI00043469 | R.EN#M*SLPSNLQLNDLTPDSR.A | 0.7873 |
| IPI00043550 | M.PN#SSGLM*NRR.D | 0.5396 |
| IPI00043654 | M.LASNHM*N#GSNGESPLA.- | 0.6334 |
| IPI00043705 | R.YFNPVDQENALIAAIAN#WSELASMPVGR.S | 0.7935 |
| IPI00043716 | K.KLRLPDTGLYN#MTDSGTGSCKN.S | 0.6021 |
| IPI00043716 | K.N#GTVDGTSENTEDGLDRK.D | 0.8943 |
| IPI00043724 | R.LSQNQNNYQISGN#LTVPWITGCSR.K | 0.7428 |
| IPI00043744 | R.QGN#LSLPLNRELVEKVTNEYN#ESLLYSPEEPK.I | 0.8137 |
| IPI00043745 | R.VKN#GSRVVSTALLSSYHKGI.A | 0.92 |
| IPI00043992 | S.LKDN#SSCSVMSEEPEGR.S | 0.5533 |
| IPI00044283 | R.TPRPASTHN#GSVDTEN#DSCLQQTH.- | 0.9394 |
| IPI00044315 | -.MSAGN#GTPWGSAAGEEVWA.G | 0.5879 |
| IPI00044369 | R.VN#LSFDFPFYGHFLR.E | 0.9999 |
| IPI00044369 | R.SFTDLLLDDGQDN#NTQIEEDTDHNYYISR.I | 1 |
| IPI00044369 | K.ITN#ISAVEM*TPL.P | 0.6299 |
| IPI00044456 | R.FPGVM*EN#LTISAAHWLTAPAPRPRPR.R | 0.544 |
| IPI00044461 | M.DRWN#ETVGLEWELERQLALMNSQFNRR.V | 0.9317 |
| IPI00044461 | R.NFDKNGNMMDWWSN#FSTQHFR.E | 0.5094 |
| IPI00044529 | R.KSIDEM*NNAWENLN#KTW.K | 0.6338 |
| IPI00044631 | R.N#ITPLLLDMVVHNDR.L | 0.5685 |
| IPI00044650 | K.SKSDLAVSN#ISPPSPDSK.S | 0.8147 |
| IPI00044683 | G.DQLSN#LSNLLQQYK.T | 0.633 |
| IPI00044714 | D.QYGKN#FSQ.S | 0.6101 |
| IPI00044726 | R.N#NSKGYM*KLENKEDPM*DRLL.V | 0.6866 |
| IPI00045438 | N.N#ATN#ESYVDTAAMEAER.L | 0.5244 |
| IPI00045486 | R.TEDVMFISDN#ESFN#PSLWEEQR.K | 0.975 |
| IPI00045512 | R.GSVIGNINDVEFGIAFLN#ATITDSPN.S | 0.5086 |
| IPI00045512 | R.YLQINNADLGDTAN#YTCVASNIAGK.T | 0.7655 |
| IPI00045512 | R.QLGN#GSLAIYGTVNEDAGDYTC.V | 0.6632 |
| IPI00045512 | R.VRASSYSAN#GTIE.Y | 0.5949 |
| IPI00045856 | R.KAVPM*APAPASPGSSN#DSSAR.S | 0.5172 |
| IPI00045914 | S.SSREEN#WSFLDWDSR.F | 0.8475 |
| IPI00045914 | K.N#DTAAVQLHFVSGNNVLAHRS.L | 0.676 |
| IPI00045928 | K.SVGIFLGIFSGSFTMGAVTGVNAN#VTK.F | 0.5903 |
| IPI00045942 | R.LKTEYN#ITLR.V | 0.7003 |
| IPI00045953 | -.NN#FSTEIN#TTSILVGPLVSNLEITHTSN#LTR.V | 0.5945 |
| IPI00046047 | R.HN#FTLAFSTAEKLADCAQLLD.V | 0.5968 |
| IPI00046260 | K.VHTGTHM*WN#STPVXQGRQLSGDGPMTFLGGNPIK.F | 0.6128 |
| IPI00046366 | K.GTENHLLAIVN#GTKGSR.W | 0.5746 |
| IPI00046793 | K.QPSSPLAN#TTYNIFIMDGK.T | 0.9425 |
| IPI00047137 | K.MENGQQAADNILSAVPPGLIN#TSEAGIPAMSTND.L | 0.7651 |
| IPI00047437 | R.KMFLFGTYLTKN#GSEIPSTM*QDAK.D | 0.7148 |
| IPI00047620 | Y.HGN#GTHSESLEHHGYHGN#GTDR.E | 0.8103 |
| IPI00047620 | R.GYHGN#GTHSESLEHR.G | 0.6073 |
| IPI00047620 | R.VQN#TSLEHRGYHGSGTDGESSGRR.G | 0.5039 |
| IPI00049891 | D.DRGSYTASIYQNYMGNSFSGYSHSPPLLQVN#R.S | 0.6228 |
| IPI00050342 | -.MENRNN#M*TEFVLLGLTENPKM*QK.I | 0.6014 |
| IPI00050486 | R.TN#FTLAELGICEPSPHRSGYCSDMGILHQ.G | 0.7133 |
| IPI00051170 | K.YKELTLTRNQGICGKN#NSYI.E | 0.7528 |
| IPI00051926 | N.QGN#FSVVGTVLAATQAEKAVANFDR.T | 0.8374 |
| IPI00053761 | R.TQN#LSQPSTGIPSGEPGHSAGGAAGSRCTRSMFR.K | 0.6953 |
| IPI00054085 | M.AN#RTDNTN#RTGDATVIKQEM*LTGQEM*PR.E | 0.6436 |
| IPI00054853 | K.VTCDIDVN#SSLN#ISAVGKSTEK.E | 0.6021 |
| IPI00054874 | K.HLFEDSQNKLGAEM*VIN#TSGKYGYK.S | 0.6513 |
| IPI00055218 | R.SKGAIAPPEVTVPAQN#TSLGPK.K | 0.9359 |
| IPI00055405 | K.KVLAPRVN#LTFR.K | 0.5407 |
| IPI00056324 | K.YERGLIFYIN#HSLYENLDEELNEELAAK.V | 0.5595 |
| IPI00056499 | K.WMLKTGMKNN#ATK.Q | 0.9557 |
| IPI00056506 | R.IFVGGIDFKTN#ESDLR.K | 0.541 |
| IPI00056511 | K.YNLEKDLKDKFVALTIDDICFSLNN#NSPNIR.Y | 0.5393 |
| IPI00056521 | -.MHRIMGVN#STAAA.A | 0.6667 |
| IPI00057386 | R.QMGGNTNTGAALN#FTLSLLQKAK.K | 0.6167 |
| IPI00058265 | -.M*M*GHQN#HTF.S | 0.9264 |
| IPI00058344 | K.SSN#LSEHQTLHTGQR.P | 0.7346 |
| IPI00058949 | R.YGN#TTQNVPHNPR.R | 0.596 |
| IPI00059144 | R.VVN#ESTVCLMNHERR.Q | 0.7988 |
| IPI00059279 | R.ISESGIKKMCRNIFVLQQN#LTN#ITMSR.E | 0.9055 |
| IPI00059434 | K.N#NSMNSNMGTGTFGPVGNGVHTGPESR.E | 0.8325 |
| IPI00059632 | K.DHPVSCCLGLLLESLVPFIVNDN#ITNNFFR.F | 0.8635 |
| IPI00060143 | R.GLNIALVN#GTTGAVLGQKAFDMYSGDVM*HLVK.F | 0.7846 |
| IPI00061178 | R.GPPSRGGHMDDGGYSMNFN#MSSSRGPLPVK.R | 0.589 |
| IPI00061245 | R.RLWQGLGN#FSVN#TSKGNTAKNGGLLLSTNM*K.W | 0.6969 |
| IPI00061280 | F.SYATAAQN#NTVTDPK.N | 0.8079 |
| IPI00061780 | R.VSTN#GSDDPEDAGAGENRR.V | 0.7468 |
| IPI00061876 | K.KYLWEN#ETVGAQDDPL.A | 0.8062 |
| IPI00062751 | K.ILPISLEPSSSTEPTQSN#LSVTAK.I | 0.944 |
| IPI00063106 | K.N#DSDCGVFVLQY.C | 0.6791 |
| IPI00063106 | K.FNVATQN#VSTLSSK.V | 0.8109 |
| IPI00063120 | K.WIHTLTSLLQN#ISSYYTSLPR.F | 0.5428 |
| IPI00063217 | R.N#DSIYEASSLYGISAMDGVPFTLHPR.F | 0.5123 |
| IPI00063408 | M.LPN#PSHLEAVNPVAVGKTRGR.Q | 0.5408 |
| IPI00063523 | R.ESEELECNTGSN#ITNMHQDK.E | 0.6076 |
| IPI00063523 | K.QN#KSPDTEKINYAGPLEETGISDITKKEK.E | 0.8635 |
| IPI00063523 | K.AN#LTDM*ESGSSNAMNMNVQHER.E | 0.7769 |
| IPI00063590 | K.VSN#LSLFGGLPANHVLVNQYLP.G | 0.8335 |
| IPI00063780 | -.MVDLLSM*SQN#ISPYKNPM*R.F | 0.6475 |
| IPI00063800 | R.SPPGEN#PSPQGELPSPESSRRL.F | 0.8459 |
| IPI00064174 | A.GFGNN#FTTVDN#K.S | 0.5261 |
| IPI00064201 | K.SSVTPAIISAALQQVVHN#K.S | 0.7279 |
| IPI00064219 | K.N#VTLEEDGTRAVRAAGYAHGLVFSTK.E | 0.6342 |
| IPI00064667 | R.LVPHM*N#VSAVEK.Q | 0.9997 |
| IPI00064667 | K.AIHLDLEEYRN#SSR.V | 0.9958 |
| IPI00064743 | K.AQNGIAIMVYTN#SSNTLYWELNQAVR.T | 0.9689 |
| IPI00065253 | K.ADN#HTAHRIADQTALRVPSQAESSIFSQATN.G | 0.5338 |
| IPI00065348 | K.INLLN#LTFCLFVWLTFNLPFLK.N | 0.8832 |
| IPI00065383 | K.YITVN#ISYVNIF.R | 0.9461 |
| IPI00065390 | K.CPECDQN#FSDHSYLVLHQK.I | 0.5167 |
| IPI00065457 | K.LEVEDLDENFLN#SSYQTVFK.T | 0.9197 |
| IPI00065553 | R.VLTN#M*THEDDVPIN#CTMVLLHIVSK.C | 0.542 |
| IPI00066511 | K.VSSPLENEKLKSM*TIN#FSSLNR.K | 0.5623 |
| IPI00066511 | R.SYSVSGVCQPAIPN#SSLHIPHN.A | 0.793 |
| IPI00067421 | -.MLTGVLLAN#GTLN#ASILNSLYNENLVK.E | 0.6772 |
| IPI00067744 | F.FLTTPAIIM*NTIDMYN#VTRPIEK.L | 0.9394 |
| IPI00068174 | K.GKRMLSEYLSPN#LSLR.A | 0.9293 |
| IPI00069084 | D.SDMDPN#SSGEGVNSVSSS.I | 0.7917 |
| IPI00069084 | D.KAKKEHERSN#ASPAIFPEYQLWEDHWIR.C | 0.9279 |
| IPI00069126 | F.APFLN#NSPQQNPAAQIPAR.Q | 0.5403 |
| IPI00069232 | Q.IVIKMFQN#ISNIIKSGK.M | 0.6518 |
| IPI00069817 | K.N#ASMNTQHGTATEVAVETTTPK.Q | 0.9321 |
| IPI00070643 | R.EYNLN#FSGSSTIQEVK.R | 0.7141 |
| IPI00071171 | R.VGECSCQVSLMLQN#SSAR.A | 0.9243 |
| IPI00071509 | V.VRSGASLLSN#M*SR.H | 0.7027 |
| IPI00072656 | K.LIKTDESVVDRAKAN#ASLWEAR.L | 0.6179 |
| IPI00073264 | V.SWEILSN#LSFLVTIQR.A | 0.5504 |
| IPI00073289 | N.DNFGIGGN#FSGLGGFGGSR.G | 0.5598 |
| IPI00073577 | R.RLSIGLDN#GTISEFILSEDYN.K | 0.5822 |
| IPI00073730 | -.MNGGN#ESSGADRA.G | 0.6388 |
| IPI00075272 | M.N#GTSSQPKKEEYGS.- | 0.786 |
| IPI00080897 | N.KM*GQLGLGN#QTDAVPSPAQIMYNGQPITK.M | 0.9485 |
| IPI00081089 | K.LKLEAELGNM*QGLVSGM*QN#MSIHTK.T | 0.8603 |
| IPI00083235 | G.KVFN#DSGN#LSNHK.R | 0.8681 |
| IPI00083281 | K.VTRDALTEPLAIVEGYNSYFSFSRN#R.S | 0.8071 |
| IPI00083708 | K.SNEVVAVPTN#GTVNNVAQEPVNTL.G | 0.5435 |
| IPI00084434 | R.AQIFANTVDN#SSIALQTDNTHLAADDLR.V | 0.9349 |
| IPI00084684 | K.KSFACSSCN#YTFAKKEQF.D | 0.8025 |
| IPI00085314 | M.ESLALSN#ATGLSADGGAKR.Q | 0.7372 |
| IPI00090720 | K.NGQSLGDLDGIPIAVKDN#FSTSGIETTCASNMLK.G | 0.9304 |
| IPI00090972 | R.VKAISDSDGVSYPWYGN#TTETV.T | 0.9788 |
| IPI00091258 | R.FAN#GSAVIQSGDTAVMATAVSK.T | 0.5183 |
| IPI00091258 | N.GNSVALSLSDILWNGPVGTVXIGMTDGECVVN#PTRK.E | 0.6853 |
| IPI00092641 | K.FRNPPLVN#GSLALAFQGTAPPPNWRR.P | 0.6463 |
| IPI00097839 | V.YN#GSVDEGSKPGTYVMTVTANDADDSTTANGM*VR.Y | 0.691 |
| IPI00098769 | R.RVYDFVGLLVSPEMEQFALN#MT.S | 0.7711 |
| IPI00098827 | R.FIIVSAFDHFASVHSVSAEGTVVSN#LSS.- | 0.721 |
| IPI00099004 | K.YRETKSQESEELVVTGGGGLRRFKTIELN#ST.I | 0.708 |
| IPI00099111 | K.MSGGSTMSSGGGNTN#NSNSKK.K | 0.5752 |
| IPI00099433 | V.TQQMSN#ISGSCSM*LQQTSISSPPTCSVK.S | 0.6188 |
| IPI00099433 | R.RRIN#SSVTTETISETTEVLNEPFD.N | 0.7223 |
| IPI00099650 | K.RRKPGSHTHSASEDN#TTNNVR.E | 0.6515 |
| IPI00099688 | R.LGKPSVM*TPTEGLDTGEMSN#STSSLK.R | 0.9425 |
| IPI00099863 | E.YDTIPHTN#RTILK.E | 0.9414 |
| IPI00099890 | L.GLN#LSEGDGEEVYHF.- | 0.616 |
| IPI00100099 | K.YSTTTAQN#SSSSSSQSK.M | 0.6061 |
| IPI00100099 | R.GVN#GSPRISVTVGNIPKNSVSS.S | 0.7602 |
| IPI00100151 | R.M*QN#NSSPSISPN#TSFTSDGSPSPLGGIKR.K | 0.555 |
| IPI00100291 | K.EVTQATQPEAIPQGTN#ITEEKPGR.K | 0.9988 |
| IPI00100402 | K.THMNVLGVLGPLDPQWLVENN#ITGC.P | 0.6885 |
| IPI00100453 | K.KSSLDSN#SSEM*AIMMGADAK.I | 0.6373 |
| IPI00100715 | R.SSSGHLFTLPGATPGGDPNSN#NSNNK.L | 0.6021 |
| IPI00100984 | C.QAEAAAAAN#GTGGEEDDGPAAELLEK.L | 0.9125 |
| IPI00101172 | R.WEALGNTLSSQPN#LTVSWDPR.I | 0.8018 |
| IPI00101261 | R.GM*GPM*GTPIMPSPADSTN#SSDNIYTM*TGGR.S | 0.5278 |
| IPI00101462 | K.THTN#ISESHPN#ATFSAVGEASICEDDWNSGER.F | 1 |
| IPI00101462 | R.GLTFQQN#ASSM*CVPDQDTAIR.V | 1 |
| IPI00101462 | K.N#NSDISSTR.G | 1 |
| IPI00101952 | R.NPVTSTNVLGMMTAILGVFLYN#KTK.Y | 0.9204 |
| IPI00102329 | K.DDWIRPALLSGPVAANVLN#FSDHHVIPM*PLLK.G | 0.7592 |
| IPI00102378 | K.LEFLPEEIGQMQKLRVLN#LSDNRL.K | 0.5894 |
| IPI00102543 | K.MNCNNRN#VSSLADLKPK.L | 0.7013 |
| IPI00102677 | R.LEEFEGGGGGEGN#VSQVGRVWPSSYR.A | 0.9512 |
| IPI00102678 | R.LVSN#DSFISIQPSLSSCGQDLPR.D | 0.7196 |
| IPI00102752 | R.SKKLGGSGGSN#GSSSGKTDSGGGSRR.S | 0.6252 |
| IPI00102829 | T.DGTTITESSN#LSEIESR.L | 0.6275 |
| IPI00102856 | M.MNYGQSMSGGNGQAAN#QTLSPQMWK.- | 0.5956 |
| IPI00103026 | F.SYPNGLSEN#TSVVEKLK.H | 0.7284 |
| IPI00103055 | K.HAAFFADAEGYFAACTTDTTMN#SSLSEPLYVPVK.F | 0.8229 |
| IPI00103277 | K.N#GTAVCATNR.R | 0.9995 |
| IPI00103277 | K.LSDLSIN#STECLHVHCR.G | 1 |
| IPI00103277 | K.FLNN#GTCTAEGK.F | 1 |
| IPI00103288 | R.ASVVWM*AYM*N#ISFHVGNHVLSELGETGVFGRSSTLK.R | 0.6024 |
| IPI00103335 | E.DGLYGAPEPN#GSWTGM*VGELINR.K | 0.6009 |
| IPI00103380 | D.DSGATLLSAN#QTLRRLHNRR.T | 0.6553 |
| IPI00103419 | K.MEQKAKQNQVASPQPPHPGEITNAHN#SSCISNK.F | 0.5721 |
| IPI00103451 | K.DRCNVEKVPSNSQLEIEGN#SSGR.Q | 0.5878 |
| IPI00103487 | K.KLAEILVN#TSSENWIR.N | 0.7167 |
| IPI00103552 | K.VPTGTITEVSSTGVN#SSSK.I | 0.8545 |
| IPI00103552 | T.QHFYLN#FTITNLPYSQDKAQPGTTNYQRNKR.N | 0.9423 |
| IPI00103552 | K.FN#TTEXVLQGLLXPX.F | 0.7668 |
| IPI00103552 | R.KTNELPSDSSSSSDLIN#TSIAS.S | 0.7492 |
| IPI00103552 | K.N#TSVGPLYSGSRLT.L | 0.7448 |
| IPI00103552 | M.AAGPLLVPFTLN#FTITNLQYGEDMGHPGSRK.F | 0.5561 |
| IPI00103552 | R.EPGTSSTSN#LSSTSHER.L | 0.5329 |
| IPI00103577 | -.MERAPPDGPLN#ASGALAGDAAAAGGAR.G | 0.6536 |
| IPI00103606 | V.QVCSLPACGGNHQN#STVR.A | 0.5192 |
| IPI00103647 | R.MIVEIHLEEYNN#ISKKPM*NLVLFR.F | 0.5834 |
| IPI00103723 | K.GEISEKAKLEN#STQAEEGFDVPDCK.K | 0.7861 |
| IPI00103752 | K.RRTTN#RTIPSVDDFQNYLRVAFQEVNSGCTGK.T | 0.5825 |
| IPI00103755 | K.M*PYIQN#LSSLPTRTELR.T | 0.5618 |
| IPI00103772 | P.MQNFM*AGTAGVYQTQGLVGSSN#GSSHKK.S | 0.7419 |
| IPI00103871 | R.IQLEN#VTLLNPDPAEGPKPR.P | 0.9983 |
| IPI00103879 | R.TLQQLYEAYASKSN#NTAYLIYNDGVPK.P | 0.9018 |
| IPI00104074 | R.WGHSECGHKEDAAVN#CTDISVQK.T | 0.9993 |
| IPI00105353 | W.LNAQFDGNN#ETIK.W | 0.7496 |
| IPI00105532 | R.CTLHPN#DSLAMEGPLSRVKSLKKS.L | 0.7472 |
| IPI00106786 | R.VGVDPDQDPPPNN#DSFQVLQGDSPDSAR.G | 0.5136 |
| IPI00106795 | V.KVVMDIPYELWN#ETSAEVADLK.K | 0.6752 |
| IPI00107463 | K.LN#PTPGSNAISDAYLN#ASETTTLSPS.G | 0.7419 |
| IPI00107463 | K.WKNIETFTCDTQN#ITYR.F | 0.7143 |
| IPI00107617 | K.HSSGSSN#TSTANRR.A | 0.6024 |
| IPI00107642 | R.KFKTNVLPFRQN#DSSSHCQKSGSPISSEERR.R | 0.6554 |
| IPI00107728 | K.VDSN#DSLYGGDSKFL.A | 0.6038 |
| IPI00107838 | R.ASSPN#STVSN#TSTEGFGGIM*SFASSLYR.N | 0.6865 |
| IPI00140246 | M.DTRN#LSLAHNR.I | 0.8804 |
| IPI00140489 | I.SNPLHCN#MTMTPGTCR.V | 0.5482 |
| IPI00141118 | M.N#NSCLTNAVHLNN#VSVVSPVNVHINTR.T | 0.7235 |
| IPI00141559 | M.LFLSMN#LTISAGPASTLPTATPAAGELTMR.S | 0.7546 |
| IPI00142487 | R.RSLN#SSSSSPPSSPTM*MPR.L | 0.6373 |
| IPI00142538 | M.KNSCNVLHPQSPN#NSNR.Q | 0.8927 |
| IPI00142768 | S.ISHDNNN#ISSTSELGTDLANTK.V | 0.8639 |
| IPI00142919 | R.ILVN#LSMVENKLVELEHTLLSK.G | 0.5 |
| IPI00144289 | R.VRRTDDTPVVLVGN#KSDLKQLRQVTK.E | 0.5634 |
| IPI00146438 | G.IKVKN#HSGGGMSLTHNKNFRK.L | 0.6838 |
| IPI00147583 | M.LGSEM*XGQN#VSNPAPSPSLSGVSWPDNVPK.I | 0.6936 |
| IPI00147583 | R.VWQN#LSEPIR.P | 0.5571 |
| IPI00147633 | R.KN#ASALYEKIR.G | 0.5294 |
| IPI00147702 | K.HTGSGILSMANAGPNTN#GSQFFICTAK.T | 0.6152 |
| IPI00148050 | K.GACN#GSVDCEDTTNHNILQAR.D | 0.7687 |
| IPI00149695 | K.QVGEKAM*N#ASAN#ITSDGVEVLGKMVR.S | 0.9947 |
| IPI00151777 | M.SSHFYINDVN#FTRKMLLM*FFEVSAHE.S | 0.6298 |
| IPI00151888 | M.N#GSGQSPSVLKGILHEAAMQYPK.Q | 0.9394 |
| IPI00151982 | M.KENPAKEQLWALEQDN#CSLANLVCK.V | 0.6234 |
| IPI00152048 | M.VVLCASTLPDWRNAAADN#RSLDDR.S | 0.7416 |
| IPI00152075 | R.FVRLGTASMLTSPDGPFIN#LSR.L | 0.911 |
| IPI00152101 | K.KDGEN#VSM*KDPPDLLDRQK.C | 0.6088 |
| IPI00152101 | K.N#ETVSSN#SSN#NTGN.S | 0.7436 |
| IPI00152101 | K.VLQAMGYPTGFDADIECMSSDEKSDN#ESKN#ET.V | 0.7046 |
| IPI00152254 | R.QRN#ASRDQ.V | 0.6481 |
| IPI00152295 | K.VRRPSPN#RSKLSNVARK.A | 0.7394 |
| IPI00152316 | M.TWSFGWN#SSLPVYYIR.E | 0.5125 |
| IPI00152391 | K.VKFGMN#VTSSEK.V | 0.5162 |
| IPI00152410 | K.LKTN#VTFPLDILLLSFK.A | 0.6682 |
| IPI00152418 | K.TLSTKTPSAAQNPMMTN#ASATQATLTAQK.F | 0.5389 |
| IPI00152427 | R.CDKAFN#QSAN#LTK.H | 0.9383 |
| IPI00152440 | K.EKDSN#SSSGSFNGEQEPIIGFQPMDSTR.A | 0.828 |
| IPI00152468 | L.YN#DSTYNQQLIIPSIGLPLK.T | 0.9822 |
| IPI00152474 | K.N#TSNKEISRDTLLTIENNP.C | 0.7336 |
| IPI00152510 | R.SRATIFEIN#ASSRDLCSQVMRAKR.Q | 0.6619 |
| IPI00152513 | R.GNIYPGN#DTFDIDPEIE.T | 0.9361 |
| IPI00152524 | M.NRRNILVMKHN#YSQDAADACDIDEIEEVPTTSHR.L | 0.9451 |
| IPI00152527 | A.IYFENLQN#SSNDLGDHSMKER.D | 0.8129 |
| IPI00152540 | K.FDILMTSNEIN#ATGHQQTLLVPSEDGA.T | 0.6607 |
| IPI00152540 | M.EAVQKIN#YTVPQSGTFK.I | 0.7268 |
| IPI00152542 | R.M*DDVPSHSKALSDGN#GSSGIEWS.N | 0.5941 |
| IPI00152542 | L.IHALATN#SSSELFRLAAHPLNNR.M | 0.791 |
| IPI00152581 | Q.RN#ISLQLM*SNM*N#ISNKIR.N | 0.9822 |
| IPI00152602 | K.MFFETNENN#DTTYQNLWDA.F | 0.597 |
| IPI00152602 | K.N#LTQSHSTTWKLNNLLLNDYWVHNEMK.A | 0.9032 |
| IPI00152615 | L.KLGVVPVYYGSPSITDWLPSN#KSAILVSEFSHPR.E | 0.756 |
| IPI00152627 | A.HN#MSGPN#SSSEWSIEGRR.L | 0.5616 |
| IPI00152627 | K.ALATSMLTGEAGSLPSTHMVVAGMAN#STPQ.Q | 0.5357 |
| IPI00152642 | R.VQPAQN#HSSLSN#VSQAVASTTPLPPPK.P | 0.5464 |
| IPI00152647 | K.N#LTAVKSGGTSDSFVKGYLLP.D | 0.7705 |
| IPI00152661 | M.DFGDSSGVEM*RLHN#M*SEAMAVTAYHQYSK.G | 0.627 |
| IPI00152696 | K.LPHN#GSTGSTPLLR.N | 0.7825 |
| IPI00152720 | P.FPGN#M*SSMTPSSPGM*SQQGGPGMGPPMPTVNR.K | 0.741 |
| IPI00152788 | L.VISGLSAAEGGN#TSDTQSSSSVNIVMGPSAR.A | 0.7899 |
| IPI00152797 | K.DNKYTLN#QTSAVFDSIPEVVHYYSNEK.L | 0.7721 |
| IPI00152818 | K.LSDSN#QTLKVIGEFILER.N | 0.7604 |
| IPI00152849 | K.N#PTTEETVLTK.T | 0.8801 |
| IPI00152944 | R.LM*AFGCVSGSVQVYTIDN#STGAMLLSHK.L | 0.837 |
| IPI00152985 | K.M*IGLEDFVADN#YSK.I | 0.9678 |
| IPI00154162 | K.ELFGDDSEDEGASHHSGSDN#HSER.S | 0.9015 |
| IPI00154451 | K.SGN#YTVLQVVEALGSSLENPEPRTR.A | 0.7456 |
| IPI00154528 | M.RGIETVLLIKN#NSVARAVM*QSQK.P | 0.963 |
| IPI00154588 | R.IAQKGGAEAM*LVVN#NSVLFPPSGN#R.S | 0.5979 |
| IPI00154813 | K.EANIN#STSISDDNSASLR.C | 0.5682 |
| IPI00155227 | K.AKAGFSEWLAVDGLGSPSN#NSKE.D | 0.5323 |
| IPI00155647 | M.VDAASYAAN#LTDSAEAPKGSPGSWWKK.E | 0.7446 |
| IPI00155729 | R.LVVGDFSDYN#NSYVGAFADAR.S | 0.5716 |
| IPI00156651 | R.YQQLAVALDSSYVTNKQLN#ITIEK.L | 0.6814 |
| IPI00157364 | K.NYEDEPNNYRTMHGRAVN#GSQLGK.D | 0.687 |
| IPI00157589 | R.KN#ITNDIR.T | 0.6462 |
| IPI00157790 | R.YIRTLMSSGQMAPSSSN#K.S | 0.5034 |
| IPI00157790 | R.QN#SSSAQGSSSNSGGGSGIPQP.P | 0.6873 |
| IPI00158615 | T.PKGN#SSNGNSGSNSNK.A | 0.7669 |
| IPI00158615 | K.LYDQCHDTLVQFGGFLASN#LSTEDY.I | 0.589 |
| IPI00159049 | S.PARQN#VSSASNPEN#DSSHVR.I | 0.6941 |
| IPI00159322 | K.GNKNGDN#NSNHNGEGNGQSGHS.A | 0.5747 |
| IPI00160130 | R.FQFCGRN#ASAVPVFYSSM*STAMVIFKSGVVNR.N | 0.794 |
| IPI00160130 | K.LCSSVN#VSNEIK.S | 0.7188 |
| IPI00160131 | K.ISNVALDSMHWQN#DSVQ.I | 0.8062 |
| IPI00160131 | V.ERPSSLLSLN#TSNK.G | 0.6142 |
| IPI00160265 | R.N#ITIMASGNTGGEK.D | 0.5234 |
| IPI00160290 | R.TNSRLSHMPPLPLN#PSSN#PTS.L | 0.6013 |
| IPI00160316 | N.#LTQNLMQN#LTQSLSQKENR.E | 0.7429 |
| IPI00160348 | T.N#ASPEKTTYDSAEEENKENLYAGK.N | 0.5938 |
| IPI00160395 | K.AIIN#STVTPN.M | 0.5471 |
| IPI00160432 | K.VDPETNKN#ITRGQSLDNLIK.V | 0.5003 |
| IPI00160566 | K.AFSQN#ISLVQHLR.T | 0.7411 |
| IPI00160901 | K.SSEFASIPAN#SSRPLSN#ISKSGR.M | 0.7207 |
| IPI00162732 | R.EQQN#DTSSELQNR.E | 0.5727 |
| IPI00163147 | R.DNGPDGMEPECVIESNWNEIVDSFDDMN#LSESLLR.D | 0.8212 |
| IPI00163207 | R.LYHFLLGAWSLN#ATELDPCPLSPELLGLTK.E | 1 |
| IPI00163207 | R.GFGVAIVGN#YTAALPTEAALR.T | 1 |
| IPI00163207 | R.LEPVHLQLQCMSQEQLAQVAAN#ATK.E | 1 |
| IPI00163328 | T.PVPGYMN#NTVNTM*R.L | 0.5923 |
| IPI00163446 | R.EVN#TSGFAPARPPPQPGSTTFWAWSVLR.V | 1 |
| IPI00163446 | R.TLLN#ASR.S | 0.9762 |
| IPI00163504 | K.VLEAN#ATPLDRGDGVLRTCALR.P | 0.9855 |
| IPI00163507 | R.TRSTSSAGSN#NSAEGAGLTDNGCR.R | 0.7505 |
| IPI00163644 | K.GILYGTMTLELGGTVN#ITCQK.T | 0.5468 |
| IPI00163749 | R.KQAGPLLSGDPHLLPPAASPKGASVSINVN#TSLEDMRS.N | 0.5218 |
| IPI00163782 | K.RPLEDGDQPDAKKVAPQN#DSFGTQLPPMH.Q | 0.9462 |
| IPI00163866 | K.QKN#SSDQEGNN#ISSSSGHRVR.L | 0.6176 |
| IPI00163904 | K.NTNQN#SSAHPPHLNMDDTVN#QSNIELKNVNR.N | 0.7566 |
| IPI00164104 | I.QIRN#VSQLPATWRMK.E | 0.7807 |
| IPI00164104 | F.TQNLLLEYTN#QTTQAR.P | 0.5026 |
| IPI00164246 | R.DGEQSPN#VSLM*QRMSDM*LSR.W | 0.7974 |
| IPI00164345 | R.KQSESSFISGDIN#STSTLNQGLTSHGLR.A | 0.7627 |
| IPI00164356 | K.SFLNAFSEEIN#NSMIILSLSPTTFK.N | 0.5919 |
| IPI00164550 | M.DGN#DSDYDPK.K | 0.5836 |
| IPI00164623 | K.TVLTPATNHMGN#VTFTIPANR.E | 1 |
| IPI00164623 | K.HYLMWGLSSDFWGEKPN#LSYIIGK.D | 1 |
| IPI00164623 | K.VVPEGIRMN#K.T | 0.8373 |
| IPI00164755 | K.GEPGAPGEN#GTPGQTGAR.G | 0.8206 |
| IPI00164831 | K.RYEDGTISSN#ATHVEHPLCPPK.P | 0.6156 |
| IPI00164930 | R.HIANSIRTHGTGIMN#TTKWAFTAWRGG.P | 0.6579 |
| IPI00164998 | N.#KTTSLGQMENNNLDELN#KSKIIVKKK.P | 0.6713 |
| IPI00165024 | M.IQNTFN#FSLK.Q | 0.9781 |
| IPI00165024 | K.SKEQN#VSDDPESTGFLYPYNDLLVWAVLM*KR.Q | 0.5517 |
| IPI00165064 | R.RYTN#SSADNEECRV.P | 0.6205 |
| IPI00165171 | R.VGGFGFVATPSPAPGVN#ESPM*MTWGEVENTPLR.V | 0.5058 |
| IPI00165210 | K.LAKIRDNLAISLDN#QSSPSPPVL.I | 0.5037 |
| IPI00165246 | R.FM*GPASGM*N#M*SGMGGLGSLGDVSK.N | 0.8641 |
| IPI00165250 | L.GNTKDFIISFDLKFLTN#GSVSVVLETTEK.N | 0.6943 |
| IPI00165319 | K.TSIAQSVLQSLPSSQWSVLVVN#MSAQ.T | 0.869 |
| IPI00165357 | K.CSVALLN#ETESVLSYLDKE.D | 0.9629 |
| IPI00165438 | R.GPECSQN#YTTPSGVIK.S | 0.9998 |
| IPI00165598 | R.N#PSQLPALSSSPAHSGM*MGINSYGSQLGVSI.S | 0.6384 |
| IPI00165934 | R.EPAQGLFGTVTVQFIVTEVN#SSN#ESK.D | 0.6157 |
| IPI00165934 | M.TSWISPAVN#NSDFWTYRK.N | 0.6995 |
| IPI00165934 | F.QLM*N#ITAGTSHVMISR.R | 0.5155 |
| IPI00165934 | N.DQLSEIEEFFYIN#LTSVEIRGLQK.F | 0.5067 |
| IPI00165979 | V.KPYVN#GTSPVYSR.E | 0.9069 |
| IPI00165981 | R.HDQEN#DTR.W | 0.6783 |
| IPI00166010 | K.DVPPSIN#TTNIDTLLVAT.D | 0.5707 |
| IPI00166010 | M.LLN#GTPFAFVIDLAALASRR.E | 0.513 |
| IPI00166010 | R.N#LTAGMAMSTCR.E | 0.5019 |
| IPI00166031 | K.TRPQN#GSM*ILYNRK.K | 0.8987 |
| IPI00166078 | K.HPENNQKSENNQKLLTGAN#SSR.F | 0.7187 |
| IPI00166078 | L.RTTNGRLNIDNLN#LSFRK.E | 0.604 |
| IPI00166086 | L.NRIPGVPGSM*PN#ASWTGNLR.A | 0.9053 |
| IPI00166121 | K.LVGLN#LSPPMSPVQLPLR.A | 0.7296 |
| IPI00166145 | R.LLN#LSFCGGISDAGLLHLSHM*GSLRSLNLR.S | 0.8326 |
| IPI00166161 | R.QKEN#DTQIFN#DSAVDN#HSK.C | 0.816 |
| IPI00166161 | K.SIEN#DSDEVEERAENFPR.T | 0.8327 |
| IPI00166201 | M.PTECIPENHCGTHAPVWLN#GSHPLEGDGIVQR.Q | 0.7812 |
| IPI00166283 | R.RGAIKHQVN#FSSGGVAPLGGSWHR.L | 0.8876 |
| IPI00166301 | S.PQRSSM*NN#GSPTALSGSKTNSPK.N | 0.6801 |
| IPI00166323 | K.WLPN#STTTCSLSPDSAI.L | 0.7488 |
| IPI00166392 | R.FQLLN#FSSSELK.V | 0.9999 |
| IPI00166500 | S.VN#GSGALGSTGGGGPVGSM*ENGK.P | 0.6749 |
| IPI00166533 | R.FLNN#DSSGAEANSEK.Y | 0.772 |
| IPI00166652 | K.TDEKLN#VSDENTASCPLSPIK.M | 0.8775 |
| IPI00166705 | R.GM*YLVFDGSVDLHYN#CSAKCK.S | 0.9101 |
| IPI00166713 | K.AYAGRKQHYIAGN#CSSNGR.G | 0.5749 |
| IPI00166729 | R.FGCEIENN#R.S | 0.9998 |
| IPI00166729 | K.DIVEYYN#DSN#GSHVLQGR.F | 1 |
| IPI00166729 | R.GDVLHNGN#GTYQSW.V | 0.8111 |
| IPI00166842 | S.TSGLLN#STWPLPSATQR.C | 0.787 |
| IPI00166861 | K.VIQM*DVALFEMN#QSDSK.E | 0.5371 |
| IPI00166863 | K.FEALKEENMDLNNM*N#QSLTL.E | 0.9357 |
| IPI00166930 | R.LEDLEVTGSSFLN#LSTNIFSN#LTSLGK.L | 1 |
| IPI00166930 | K.LYLGSNN#LTALHPALFQN#LSK.L | 1 |
| IPI00166930 | K.LGSLQELFLDSNN#ISELPPQVFSQLFCLER.L | 0.9989 |
| IPI00166930 | R.AFGSNPN#LTK.V | 0.9987 |
| IPI00166930 | R.WLNVQLSPWQGSLGLQYN#ASQEWDLR.S | 0.9721 |
| IPI00166930 | R.NAITHLPLSIFASLGN#LTFLSLQWNM*LR.V | 0.7729 |
| IPI00166972 | M.SGREETEKVN#TSPSVNTKTTTESK.A | 0.6357 |
| IPI00166979 | K.WN#FSSGFIEAVFK.H | 0.5225 |
| IPI00167009 | M.KN#ATSSKQLPLEPESPSGQVGPRPAP.P | 0.8009 |
| IPI00167036 | M.RKLGHLNN#FTK.L | 0.7118 |
| IPI00167074 | K.RSVLPPDGN#GSPVLPDKR.N | 0.9653 |
| IPI00167103 | R.SAPSGGGASFN#LSLTEEHSGN#YSCEANNGLGAQR.S | 0.6969 |
| IPI00167131 | R.NLDPEN#GSGMALQPLQAAPEPGAQGQR.E | 0.7197 |
| IPI00167172 | R.KLFQEILN#TSR.E | 0.657 |
| IPI00167196 | K.HLSDYCIGPN#ASINVIM*QPLEK.M | 0.5303 |
| IPI00167238 | K.EIKGIQIGREEVN#LSLLADDMILYLENPVVSAQR.P | 0.8465 |
| IPI00167254 | D.PLTFNFISSLKAICTEIAN#CSLK.V | 0.703 |
| IPI00167513 | R.DCYYDN#STTCPKCARLSLR.K | 0.5354 |
| IPI00167549 | T.QIIN#GSVDVDTEDRQK.R | 0.5016 |
| IPI00167560 | K.N#ESNLGDLLLGFLK.Y | 0.5532 |
| IPI00167574 | M.LFNVEN#GTPASR.E | 0.9511 |
| IPI00167574 | V.PTVFAFQDPTQQVRENTDPASERGN#ASSSQK.E | 0.8038 |
| IPI00167706 | G.CNHN#STQILVNCLR.A | 0.5296 |
| IPI00167778 | M.QTTDLEQTSPPVNQAPN#QTKLEVK.A | 0.8726 |
| IPI00167801 | K.M*PPGIN#SSQSLPVDNHE.K | 0.7964 |
| IPI00167830 | R.TSNGQPVKTAGEITQHN#VTELLR.D | 0.8741 |
| IPI00167841 | R.VFTEEAKDSLN#TSEN#DSEHQ.T | 0.944 |
| IPI00167841 | M.LISVESPN#LTTPITSN#PTDTR.K | 0.667 |
| IPI00167860 | R.TSHGEPKSAVPFNQYLPN#KSN#QTAYVPAPLRK.K | 0.8829 |
| IPI00167867 | D.SSPEHN#LTKIANGVPNSK.G | 0.7867 |
| IPI00167908 | Q.QTTN#TTSTQMTNIGVYVSN#M*TDK.L | 0.7188 |
| IPI00167910 | R.NINGLFLPPSSN#ITLQK.E | 0.6072 |
| IPI00167941 | K.ILQPN#TTDEFVIPLDPR.W | 0.528 |
| IPI00168043 | M.GTPSQTSQDTSLETGQGYEDEQDGWN#SSSKTTR.V | 0.8964 |
| IPI00168056 | K.SYRN#SSYENARENSQMN#ESAPGTYVVQNPH.S | 0.8354 |
| IPI00168060 | M.KDFLTDRSN#QSHLVGVPKPGVPQTPVNK.I | 0.5068 |
| IPI00168154 | M.RANGN#TTSNKNSAAM*DAEIVLR.S | 0.9437 |
| IPI00168255 | R.FGSGAAGGSGSSN#SSGDALVTRISILLR.D | 0.6684 |
| IPI00168280 | R.SLTYLSIN#CTSISLNMFSLLHDILHE.P | 0.8199 |
| IPI00168352 | M.TN#GTLEPAAEWSVLLGVHSQDGPLDGAHTR.A | 0.575 |
| IPI00168406 | K.N#NSYSLAFLAGKLNSKVERS.Q | 0.8794 |
| IPI00168431 | K.DYPSN#TTSSTSNSGN#ETSGSSTIGETSKKK.R | 0.924 |
| IPI00168442 | R.HM*DM*LTAADRLPTQAPLSTSQSVSGKN#M*TASQGP.C | 0.6251 |
| IPI00168475 | P.DRN#CSWALGPPGAALELTFR.L | 0.5633 |
| IPI00168525 | K.NKAQN#ITAPESEAICWQ.L | 0.7609 |
| IPI00168526 | R.KATM*AGGLANLQDLEN#TTPAQPK.N | 0.5775 |
| IPI00168526 | R.SPTQGYRVTPDAVHSVGGN#SSQSSS.P | 0.7164 |
| IPI00168627 | R.GRDGGEGCSWM*FQPM*N#NSKM*R.V | 0.9536 |
| IPI00168627 | K.VDTNTENSVNTMN#R.S | 0.961 |
| IPI00168632 | K.QHLQIN#WTGLTNLLDAPGINDVSDS.L | 0.9894 |
| IPI00168728 | R.EEQFN#STFR.V | 1 |
| IPI00168745 | K.M*DFLLFN#YSAPSYLRLL.- | 0.6143 |
| IPI00168759 | M.N#ISLAFFLYDLLSLM*DR.G | 0.7668 |
| IPI00168839 | E.ALAAMQDPEVMVAFQDVAQNPAN#MSK.Y | 0.9109 |
| IPI00168868 | R.ATPTPSPANAHVN#GSADAPENALHLAEAGGLCGESR.A | 0.8598 |
| IPI00168931 | K.VANN#VTEFIFLGLSQDSGM*R.W | 0.8801 |
| IPI00168954 | M.GDVN#QSVASDFI.L | 0.7879 |
| IPI00169020 | -.MTLVSFFSFLSKPLIMLLSN#SSWR.L | 0.8434 |
| IPI00169030 | S.N#LSFIDVCYISSTVPK.M | 0.7937 |
| IPI00169113 | R.YPIIM*NKVVYVLLTSVSWLSGGIN#STVQTSLAM*R.W | 0.718 |
| IPI00169156 | -.MSFLN#GTSLTPASFILNGIPGLE.D | 0.8803 |
| IPI00169179 | R.CPQCDCITLQN#VSAGLNHHQTF.S | 0.7436 |
| IPI00169288 | R.AN#NSDFGLVAAVFTNDINK.A | 0.5559 |
| IPI00169303 | R.FRTVN#STSWMEVNFAKNRK.D | 0.7314 |
| IPI00169325 | K.FN#KSLGHGLINKK.R | 0.8613 |
| IPI00169385 | K.GNCEDYLMISCN#NSDGIENR.N | 0.8012 |
| IPI00169401 | K.ERPISMINEASNYN#VTSDYAVHPM*SPVGR.T | 0.9183 |
| IPI00169420 | R.GVEGPQGSPRPPAPIQQLN#RS.S | 0.5758 |
| IPI00169440 | V.FNILFVTSEN#GSR.N | 0.8134 |
| IPI00170428 | E.DDFQHSSN#STYR.T | 0.7862 |
| IPI00170549 | K.ERIINYAN#SSDPTSGVSKRK.S | 0.9595 |
| IPI00170594 | K.SM*ADVLGDGGN#SSLTISEGP.I | 0.8441 |
| IPI00170605 | R.WQALVQVQPSVDPTN#ATGLDGR.E | 0.7801 |
| IPI00170667 | K.ASPSENNAGGGSPSSGSGGN#PTN#TS.G | 0.5378 |
| IPI00170675 | M.RKLHLGSSLDSSN#ASVSSSLSLASQK.D | 0.9167 |
| IPI00170730 | R.SSSFGSVSTSSN#SSK.G | 0.6301 |
| IPI00170766 | K.DPRNLLAN#QTLVYSQDLGEMTK.L | 0.6412 |
| IPI00170778 | K.TGTDSN#STESSETSTG.S | 0.9363 |
| IPI00171002 | K.RTIYLN#ITNTLN#ITNNNYYSVE.V | 0.8805 |
| IPI00171015 | K.AGHQVMVFVHARN#ATVRTAMSLIER.A | 0.619 |
| IPI00171052 | R.VKVQDLVLEPTQN#ITTKGVSVRRKR.Q | 0.9171 |
| IPI00171111 | M.NSNLPAEN#LTIAVN#MTK.T | 0.6397 |
| IPI00171111 | W.EDTQN#ASQNKIKIVGLGLLR.V | 0.7109 |
| IPI00171134 | K.RRKELGAMAFSTTAIN#FSTVN#SSAGFR.S | 0.7412 |
| IPI00171134 | K.KLCGENDRLN#HTYSQLL.K | 0.6624 |
| IPI00171134 | M.NQNAQLLIQQSSLENEN#ESVIKER.E | 0.5445 |
| IPI00171176 | K.N#FSSLHTVFCATGGGAYK.F | 0.6267 |
| IPI00171183 | C.LN#LSN#TTITN#R.T | 0.8748 |
| IPI00171206 | R.YM*IYEFWEN#SSVWNSHLQTN#YS.K | 0.533 |
| IPI00171211 | M.ASFLKN#VSATVSIN#GSGISGNTAINYK.H | 0.6028 |
| IPI00171312 | K.N#SSEFPLFSYNNGVVMTSCR.E | 0.8799 |
| IPI00171509 | K.KRQEENSQN#SSEKVM*FQSTHILPDEEKMVK.E | 0.5659 |
| IPI00171537 | R.NMYTVQN#NSGPYFNPR.S | 0.555 |
| IPI00171636 | K.AKAVALDSDN#ISLK.S | 0.5793 |
| IPI00171636 | R.QN#SSDSISSLNSITSHSSIGSSKDADAK.K | 0.7472 |
| IPI00171636 | K.QKSLTN#LSFLTDSEKK.L | 0.7166 |
| IPI00171678 | R.LEVHYHNPLVIEGRN#DSSGIR.L | 0.999 |
| IPI00171678 | R.SLEAIN#GSGLQM*GLQR.V | 1 |
| IPI00171678 | K.ALYSFAPISMHCN#K.S | 0.9956 |
| IPI00171716 | K.MNM*NVMEEAIGYFEQQLAM*LQQLSGN#ESVLDR.G | 0.5175 |
| IPI00171768 | R.FVEGTNIN#RSLLALGNVINALADSK.R | 0.5511 |
| IPI00171791 | S.LSNIVRN#LTPAPLTSTPPLRS.- | 0.7344 |
| IPI00171921 | R.GHN#LSRDELR.G | 0.6891 |
| IPI00171928 | R.LFLGN#YTGNVGNDALQYHN#NTAFSTK.D | 0.5025 |
| IPI00172422 | K.YKPLN#TTPN#ATK.E | 0.7977 |
| IPI00172530 | P.DFRN#MTGLVDLTLSRNAITRIGAR.A | 0.5919 |
| IPI00172636 | K.LKGAILTTMLATRN#FSAAK.S | 0.8405 |
| IPI00173346 | M.ASYLETMN#ITLKQQLVKVYEK.Y | 0.5949 |
| IPI00173359 | K.LLKEQAHN#LTIEM*K.N | 0.7444 |
| IPI00173359 | M.MSNQYVPVKTHEEVKMTLN#DTLAKTNR.E | 0.5601 |
| IPI00173448 | M.N#NSLDYLAYPVIVSNHRQSTTFR.K | 0.9327 |
| IPI00173492 | G.DYEPIDATGFIN#ISSLRLK.E | 0.579 |
| IPI00173844 | K.EMEEFVQSSGENGVVVFSLGSMVSN#M*TAER.A | 0.778 |
| IPI00173934 | K.HTGPGILSM*ANAGLNTN#GSQFFICTAK.T | 0.6632 |
| IPI00173934 | K.GSCFHSIIPGFMCQGGDFTLLN#GTGGK.S | 0.9033 |
| IPI00174153 | R.LGTFTTQN#ASAPRNPETPGSPVPPSGR.P | 0.5624 |
| IPI00174771 | M.HSSN#FSSSN#GSTEDLFR.D | 0.5344 |
| IPI00174772 | K.QEN#SSQENEN#KT.K | 0.6531 |
| IPI00174837 | K.NIKHSGN#ITFDEIVNLAR.Q | 0.6773 |
| IPI00174865 | M.ERESLKSPFTGDTSM*NNLETVHHN#NSKADKLK.E | 0.772 |
| IPI00174978 | P.FKYIYELNN#VTPLDNLLN#LSNEILN#AS.- | 0.976 |
| IPI00175108 | K.ALRTDYN#ASVSVPDSSGPEHILSISAGIDTIGEIL.K | 0.523 |
| IPI00175146 | M.DQMAVLLVSNIN#ESK.G | 0.6722 |
| IPI00175151 | R.DLHNMQN#GSTLVCTLTR.E | 0.9403 |
| IPI00175296 | K.SFNCN#SSLIKHWRVHTGER.P | 0.5582 |
| IPI00175421 | K.SFSLN#RTLTVHQRIHTGEK.P | 0.8543 |
| IPI00175439 | K.GDFESQN#SSLESSISQVINLEK.N | 0.7617 |
| IPI00175448 | R.ESTGAQVXM*AGDMLPN#STEQAITIAGIPQSIIECVK.Q | 0.6594 |
| IPI00176188 | -.MDPN#CSCAASDSCTCAGSCK.C | 0.68 |
| IPI00176196 | L.LKAN#NTLLKMGYHFELPGPRM*VVTNLLTR.N | 0.8041 |
| IPI00176210 | K.HGNLRNVLILMDQSAWDSN#ATLR.Q | 0.5051 |
| IPI00176376 | K.N#GSGNAIIIVVGGAAESLSSM*PGK.N | 0.9906 |
| IPI00176482 | K.GTSSSPLAVASGPAKSSSMTTLAKN#VTN.K | 0.8454 |
| IPI00176482 | I.LGKNEEAN#VTIPLQGFPRK.E | 0.5105 |
| IPI00176568 | R.WHIN#FTTFFIDCM*AAFGLAYDQK.K | 0.6687 |
| IPI00176590 | R.GGN#FSGRGGFGGSHGGGGYGGSGDGYNG.F | 0.5039 |
| IPI00176709 | K.KLSN#GSIVPLEDSLNLIEVATEVPKRK.T | 0.7248 |
| IPI00176843 | R.SQSANQVCGYVKSNSLLSSN#CSTWKYFICEK.Y | 0.9477 |
| IPI00177323 | E.NIM*AGATVLFLN#ATDLDR.S | 0.581 |
| IPI00177394 | M.SQSMGGDN#LSSLDTNEAEIEPENMR.E | 0.5416 |
| IPI00177498 | R.KENSFLTHQHGN#DSEAEGEVVCR.L | 0.5182 |
| IPI00177509 | K.EN#STLNCASFTAGIVEAVLTHSGFPAK.V | 0.6072 |
| IPI00577824 | R.TPN#SSCSTPSRTSSGLFPR.I | 0.8676 |
| IPI00177884 | M.QQFLYEISNLDTLTN#SSSFEGY.I | 0.658 |
| IPI00177884 | R.LN#SSSVSNLAAVGDLLHSSQASLTAALGLR.P | 0.5714 |
| IPI00177940 | R.RLEGTN#VTVNVLHPGIVR.T | 0.5013 |
| IPI00177967 | D.SFSQASN#VTSQLPGFPK.Y | 0.5069 |
| IPI00178015 | K.LNQLYN#CSSSLSFM*DS.C | 0.7591 |
| IPI00178140 | Y.TPTGEPVFGGLPQN#ASLIAHLAR.T | 0.5825 |
| IPI00178319 | H.GRYIASIMEN#GSLNIYSVQALTQEINK.E | 0.6701 |
| IPI00178324 | M.IMIMN#GTLYIAAR.D | 0.9405 |
| IPI00178349 | R.EDCNGIFRIN#VSVSKNLNLKLR.P | 0.8474 |
| IPI00178386 | E.VFENLDGDLGN#STEK.Q | 0.7858 |
| IPI00178386 | K.YFEEGLQDGN#DTFALLGK.A | 0.8505 |
| IPI00178415 | Q.STM*LDTNSWIFACIN#STSM*CLQGVDLSWK.A | 0.8056 |
| IPI00178607 | R.SCRAAQAM*DCEVNN#GSSLR.D | 0.7522 |
| IPI00178667 | L.APNQYVISGEVAILN#STTIEISELPVRTWTQTYK.E | 0.5461 |
| IPI00178673 | R.TALFPDLLAQGN#ASLR.L | 0.5432 |
| IPI00178675 | M.M*LGDAKIGN#NSVSSLK.N | 0.554 |
| IPI00178676 | K.N#ITDELGVLGVAGPQARK.V | 0.7784 |
| IPI00178767 | M.LQYYLN#LTEANLKGESIWK.L | 0.71 |
| IPI00178926 | R.EN#ISDPTSPLR.T | 0.9997 |
| IPI00179053 | P.PNN#VSVPLLM*PLVTLMER.Q | 0.5958 |
| IPI00179057 | K.LN#SSSSSSSN#SSNER.E | 0.8713 |
| IPI00179071 | K.QN#NTNANKPK.K | 0.9727 |
| IPI00179071 | K.QQFNTQN#QSNVM*PGPAQIMRGPTPN.M | 0.8669 |
| IPI00179131 | K.INCIRPDAFQDLQN#LSLLSLYDNK.I | 0.9323 |
| IPI00179193 | K.WSCTEASN#TSPTMSAAQNAE.- | 0.9954 |
| IPI00179193 | N.QAGDTSN#QSSGP.H | 0.635 |
| IPI00179326 | K.LLEEN#ETEAVTVPTPSP.T | 0.5796 |
| IPI00179357 | K.N#ASGTKAVSVMVK.V | 0.5661 |
| IPI00179357 | E.SFVEMSSSSFM*GISN#MTQLESSTSK.M | 0.9308 |
| IPI00179357 | K.WRRPDYDGGSPN#LSYHVERR.L | 0.8427 |
| IPI00179357 | K.VNRYDAGKYTIEAEN#QSGKK.S | 0.6046 |
| IPI00179357 | R.AN#HTPESCPETKYK.V | 0.5494 |
| IPI00179377 | K.LVQDVAN#NTNEETGDGPTTATVLAR.S | 0.7937 |
| IPI00179415 | K.ALTSETN#GTDSN#GSN.S | 0.5723 |
| IPI00179453 | M.FCNQQSVCDPPSQNNAAN#ISMVQAASAGPPSLR.K | 0.7732 |
| IPI00179468 | R.NIYQPPEGN#ASVIQDFTEDGHLLHTFYLGTGRR.V | 0.8474 |
| IPI00179582 | K.LRPVTLTEMN#YSKYGAK.E | 0.7547 |
| IPI00179721 | R.SCNDFGSYNN#QSSNFGPMK.A | 0.9302 |
| IPI00179972 | G.VGAFN#LTLSMLPTR.I | 0.5056 |
| IPI00180034 | R.FN#GSGSGTDFTLK.I | 0.9981 |
| IPI00180178 | K.N#KTTCLRGSDTAALVPVPLATPLLLEGR.S | 0.7197 |
| IPI00180305 | C.ALSLFLMAVNIKTPVVVEN#ITLM*CLR.I | 0.5363 |
| IPI00180305 | K.AM*EEFFSDSGELVQIMMATANEN#LSA.K | 0.5895 |
| IPI00180403 | R.ADKGPVTSILPSQVN#SSPVINHLLLGKK.M | 0.6594 |
| IPI00180404 | K.REEEEEEEGSIM*N#GSTAEDEEQTR.S | 0.9289 |
| IPI00180462 | K.YLKEAPLASSAN#GTEK.N | 0.7163 |
| IPI00180465 | -.MMATPN#QTACNAESPVALEEAK.T | 0.7847 |
| IPI00180466 | R.HPQVLQATQETLQRHGVGAGGTRN#IS.G | 0.5021 |
| IPI00180625 | R.DFDQNM*N#DSCEDALAN.K | 0.7645 |
| IPI00180627 | R.FCTQTLGVDKGYKN#QSFYRK.H | 0.9555 |
| IPI00180687 | R.GNVN#GTFIIHPDSGN#LTVAR.S | 0.6572 |
| IPI00180707 | R.LVLGTPQSNSPFGAAVGEQN#ETLIR.I | 0.7764 |
| IPI00180712 | K.YPLM*QRMTN#SSSSPSLLN#DSAK.P | 0.5241 |
| IPI00180719 | K.GHPN#RSALSLPPGLRIGPSGIPQAGLGVWNEASDLPL.G | 0.921 |
| IPI00180730 | K.DGN#ASGTMLLEALDCILPPTR.P | 0.623 |
| IPI00180919 | G.KGFICEFCQN#TTVIFPFQTATCRR.C | 0.529 |
| IPI00181081 | V.IVGVPPDSQN#LSMNPMLLLTGR.T | 0.9548 |
| IPI00181160 | E.NYLEFGLETGFTN#FSDSAMQFLEK.Q | 0.7756 |
| IPI00181174 | T.ITMIPNTLTGM*QPLHTFNTFSGGQN#STNLPHGHSTTR.V | 0.5768 |
| IPI00181260 | R.NEKCNEN#YTTDFIFNLYSEEGK.G | 0.5859 |
| IPI00181285 | K.GIVVLIDPLAAN#GTTDMHTSVPR.V | 0.9997 |
| IPI00181285 | R.KAASTLSDTKNM*EIIN#STIETLAPDSPFDH.K | 0.6375 |
| IPI00181306 | K.QHGVN#VSVN#ASATPFQQPSG.Y | 0.9438 |
| IPI00181703 | K.HN#SSSSALLNSPTVTTSSCAGASEKKK.F | 0.5105 |
| IPI00181743 | K.LALLN#ASLVKGN#LSR.V | 0.9041 |
| IPI00181743 | R.AN#GTAGPTEDHTDDFLGCLNIPVR.E | 0.876 |
| IPI00181921 | P.TSSM*N#VSMM*TPINDLHTADSLNLAK.G | 0.8415 |
| IPI00181944 | W.AQN#GSMSQPLGESPATATATATATTRPSPTTPAM*PK.M | 0.7741 |
| IPI00182027 | L.ATLGTTALN#NSNPK.D | 0.9443 |
| IPI00182116 | M.QKSTNSDTSVETLN#STR.Q | 0.5329 |
| IPI00182164 | K.LASN#GTPM*GTFAPLWEVFR.V | 0.674 |
| IPI00182194 | R.CN#ISLPMENGLNSIEWR.L | 0.5171 |
| IPI00182233 | K.VN#ATNFQALAAEFGGESFTSTFQTQSPPSFYR.A | 0.8446 |
| IPI00182469 | R.YQEAAPNVAN#NTGPHAASCFGAK.K | 0.6337 |
| IPI00182545 | R.ECFNIGNFNSMMAIISGM*N#LSPVAR.L | 0.9661 |
| IPI00182601 | R.DN#TSVYHISGKK.K | 0.8755 |
| IPI00182768 | A.RTTFN#FSIGVLQAECLTSKGR.E | 0.6009 |
| IPI00182811 | K.CPKPM*EEN#HSVSHKKSKK.K | 0.9412 |
| IPI00182840 | R.GRPALPNPEGRAREPCPN#R.T | 0.5505 |
| IPI00183110 | K.EM*YQPEDDN#NSDVTSDDDM*TRNR.R | 0.9663 |
| IPI00183230 | M.VHM*PDSLGGGPEGPCFCPTPCN#LTR.Y | 0.5918 |
| IPI00183414 | A.HVCN#DTNKMTLINPQGAKLNIYKRK.V | 0.9007 |
| IPI00183445 | K.QTESSFM*AGDIN#STPTLNR.G | 0.5272 |
| IPI00183526 | K.TLVLSN#LSYSATEETLQEVFEK.A | 0.5981 |
| IPI00183568 | K.KDAENHEAQLKN#GSLDQGSR.I | 0.9744 |
| IPI00183606 | R.GRPFPLALLGWAPSN#ITFALLFGRR.F | 0.689 |
| IPI00183706 | K.SLIEGVISGYN#ATVFAYGPTGCGK.T | 0.7301 |
| IPI00183804 | K.TFKN#ESENTCQDMTFSTWTPPPGVHSQTLSR.F | 0.9775 |
| IPI00183933 | D.VN#LSKTEKM*GNTVESEHLSELTEEEYEAHYIR.R | 0.727 |
| IPI00183965 | R.LGSSKSGDN#SSSSLGDVVTGTRRPT.P | 0.8717 |
| IPI00184048 | K.LLVNLADHNGNTALHYSVSHSN#FSIVK.L | 0.6851 |
| IPI00184048 | R.N#FSLPDICEEDPGAPAGAVELPGAWVPGAGQR.H | 0.8796 |
| IPI00184160 | R.SMPEASDQEEHLSPLDFLHSAN#FSLGSINQRLNKR.E | 0.8483 |
| IPI00184441 | K.KHELKPNN#PTEEGLASIHSVLFRKDP.F | 0.6678 |
| IPI00184533 | K.QLFTLQTVNSN#GTSDR.T | 0.6054 |
| IPI00184997 | K.SLTTECHLLDSPGLN#CSNPFTQLER.R | 0.7415 |
| IPI00185036 | K.SHISN#HTALENCVSLLCIRADEL.Q | 0.988 |
| IPI00185088 | K.AFHTEISSSDN#NTLTSSNAYNSR.Y | 0.5178 |
| IPI00185198 | K.SVSTSSPAGAAIASTSGASN#NSS.S | 0.9922 |
| IPI00185234 | K.DRIATIN#YTVLTSVLNPFIYSLRNK.D | 0.8774 |
| IPI00185251 | R.RCIIVGNGGVLAN#KSLGSR.I | 0.5341 |
| IPI00185256 | R.N#TTSTCIATVVGLTGAR.L | 0.9065 |
| IPI00185518 | -.MEN#FTALFGAQADPPPPPTALGFGPGK.P | 0.5147 |
| IPI00185526 | D.DSTEAHEGDPTN#GSGEQSK.T | 0.6032 |
| IPI00185649 | L.LSPN#LTDEQAM*LEDTLVALFDLEK.V | 0.7918 |
| IPI00185878 | R.MSMLASQQN#QSGPSGNN#QSQGNM*QR.E | 0.6421 |
| IPI00185878 | R.N#NSYSGSNSGAAIGWESASGNGFNGGSGSSMDSQSSGWEM.- | 0.8281 |
| IPI00186101 | G.NYN#NSSNFGTM*KVGNFGGRNSGSYGVGGQYFAKPR.H | 0.5471 |
| IPI00186157 | R.REN#NSPSNLPR.P | 0.6346 |
| IPI00186315 | R.SVTLQIYN#HSLTLSAR.W | 1 |
| IPI00186315 | R.FDFQGTCEYLLSAPCHGPPLGAEN#FTVTVANEHR.G | 0.9836 |
| IPI00186525 | M.MLQNILQIN#RSK.R | 0.996 |
| IPI00186843 | R.CSHGMVEANGLIYVCGGSLGNN#VSGR.V | 0.7732 |
| IPI00186850 | K.APLN#ETGEVVNEKAK.T | 0.5488 |
| IPI00187002 | K.IEEEEEEENGDSVVQNN#NTSQMSHKK.V | 0.5503 |
| IPI00187149 | R.KMLLWAMSVTLEQN#LTCPGSDLKPFTTR.L | 0.5972 |
| IPI00215608 | K.LLNSN#KSGAAFN#QSKSLTLPQTCNR.E | 0.582 |
| IPI00215613 | R.GENAYSTVLN#ISQSANLQFASLIQK.E | 0.7158 |
| IPI00215613 | L.FTM*HNN#RSLTIHQAMR.G | 0.9898 |
| IPI00215699 | D.DN#STFN#STQSHMDWGK.V | 0.6856 |
| IPI00215761 | M.LFTNEDNPHGN#DSAKASRAR.T | 0.5418 |
| IPI00215770 | R.RGAQSPGVM*N#GTPSTAGFLVAWP.M | 0.5903 |
| IPI00215869 | K.MEN#ESATEGEDSAMTDMPPTEEVTDIVEM*R.E | 0.8853 |
| IPI00215900 | K.VPWYVLAGNHDHLGN#VSAQIAYSK.I | 0.5019 |
| IPI00215979 | K.HLEGISDEDIIN#ITLPTGVPILLELDENLR.A | 0.6224 |
| IPI00215995 | R.CQKLELLLM*DNLRDKLRPIIISMN#YSLPLR.M | 0.6812 |
| IPI00216047 | R.HQGTVTEDKNN#ASHVVYPVPGNLEEEEWVRPVM*.K | 0.8674 |
| IPI00216133 | K.MSN#YSLLSVDYVVDK.A | 0.8387 |
| IPI00216142 | K.AIN#NSFAPEKLQELAFQTIQEIR.H | 0.9499 |
| IPI00216143 | R.KN#KSVWITISS.T | 0.6859 |
| IPI00216151 | R.LM*RQLLVIN#ESIESIK.W | 0.6777 |
| IPI00216171 | K.LDNLMLELDGTEN#KSK.F | 0.764 |
| IPI00216184 | L.ANLVGNLGIGN#GTTK.N | 0.8756 |
| IPI00216219 | D.KAPVN#GTEQTQK.T | 0.9349 |
| IPI00216253 | E.NN#VSKGDNGELAK.E | 0.6856 |
| IPI00216269 | R.TLHSTFQPN#ISR.Y | 0.9532 |
| IPI00216283 | R.FGKQAALDPFILLNLLPN#STDK.Y | 0.6984 |
| IPI00216311 | -.MPKPINVRVTTMDAELEFAIQPN#TTGK.Q | 0.7673 |
| IPI00216315 | R.N#RTFVLNFIK.I | 0.9256 |
| IPI00216315 | K.EVFVHPN#YSK.S | 0.9993 |
| IPI00216317 | M.DFN#LSGDSDGSAGVSESR.I | 0.9879 |
| IPI00216362 | Y.RPPDRSAPSWN#TTGEVVVTM*EPEVPIKK.L | 0.7216 |
| IPI00216529 | H.DVTN#ISTPTHVVFSSSTASTTVGFEW.- | 0.7403 |
| IPI00216560 | I.RVGN#ATIDR.E | 0.9979 |
| IPI00216560 | E.FIHLLSN#ITGAIVNTDNVQFHVDK.K | 0.9153 |
| IPI00216560 | R.VLDINDNDPVLLNLPMN#IT.I | 0.6244 |
| IPI00216560 | L.SVIDN#ASDLPERSVSVPNAK.L | 0.5203 |
| IPI00216587 | K.TRIIDVVYN#ASNNELVR.T | 0.5021 |
| IPI00216702 | R.QNIAIEVDAFGTRN#GTDDPSYNGAIIVSGDEK.D | 0.5627 |
| IPI00216711 | M.SFN#CSTRN#CSSRPIGGR.C | 0.692 |
| IPI00216721 | R.N#CSHWAVGVASWEM*S.R | 0.8429 |
| IPI00216722 | D.SAN#YSCVYVDLKPPFGGSAPSER.L | 0.9987 |
| IPI00216722 | R.EGDHEFLEVPEAQEDVEATFPVHQPGN#YSCSYR.T | 1 |
| IPI00216722 | R.FQSPAGTEALFELHN#IS.V | 0.8918 |
| IPI00216722 | Q.PSLWAESESLLKPLAN#VTLTCQAHLETPDFQLFK.N | 0.8198 |
| IPI00216744 | R.RSKSPADSAN#GTSSSQLSTPKSKQSPISTPTSPGSLR.K | 0.7204 |
| IPI00216750 | R.IGVSFIDDGSN#ATDLLR.K | 0.9589 |
| IPI00216752 | K.FN#PSLNVVDK.I | 0.5155 |
| IPI00216752 | R.FYISKGAVVDQLGGDLN#STPLHWAIR.Q | 0.5394 |
| IPI00216798 | K.NEEIDEMIKEAPGPIN#FTVFLSMFGEKLK.G | 0.9564 |
| IPI00216803 | R.KTTSNN#FTHSR.A | 0.7493 |
| IPI00216803 | R.NSN#YTYPIKPAIENWGSDFLCTEWKAS.N | 0.9624 |
| IPI00216869 | R.SPAAAILELFEEQN#GSLQELHYLMTVMER.L | 0.818 |
| IPI00216889 | K.N#ITLLPATAATTFTVTPSG.Q | 0.9734 |
| IPI00216890 | I.ELN#DSVNENSDTVGQIVHYIM*K.N | 0.8381 |
| IPI00216984 | R.DGN#GTVDFPEFLGMMARK.M | 0.5129 |
| IPI00216990 | K.LMLVSAPSILSSGN#GTAIN#M*.T | 0.7066 |
| IPI00216990 | K.IGLNIGQAIVN#TSGTVPAIPSINILQN#VTPKGEDK.S | 0.8975 |
| IPI00217002 | R.LPINGANTVIGSN#NSVQNVPTPQTFGGK.H | 0.6506 |
| IPI00217002 | K.QSSNRPAHN#ISHILGHDCSSAV.- | 0.8209 |
| IPI00217005 | R.HEKMGSN#ISQLTDKNELLTEQVHK.A | 0.8253 |
| IPI00217013 | K.EVLLKTN#LSGRQS.P | 0.9496 |
| IPI00217013 | M.HVLTAPLLAN#TEDKPSK.D | 0.9588 |
| IPI00217032 | -.M*SSKPEPKDVHQLN#GTGPSASPCSSDGPGR.E | 0.5652 |
| IPI00217051 | R.SSTSSIDSN#VSSK.S | 0.5088 |
| IPI00217051 | P.TKIGSGRSSPVTVN#QTDK.E | 0.8504 |
| IPI00217051 | M.EGFNSGLNSGGSTN#SSPK.V | 0.8461 |
| IPI00217051 | R.YATQSN#HSGIATSQ.K | 0.7705 |
| IPI00217051 | K.YHFSNLVSPTN#LSQFNLPGPSMM*R.S | 0.5912 |
| IPI00217055 | R.IVESYFMLN#STLYFSYTHMVCR.T | 0.8907 |
| IPI00217093 | R.RQISQKAFLFN#SSEQVAEFVISR.P | 0.5277 |
| IPI00217110 | R.VGLFCGIFIVLN#ITLVLAAVFK.L | 0.8825 |
| IPI00217162 | K.TKLPEYTREALCPPACRGSTTLYN#CSTCK.G | 0.9307 |
| IPI00217163 | R.N#RSYVFSSLATSAVSFATGALGMWIPLYLHR.A | 0.7188 |
| IPI00217164 | K.LVPSSSYVAVAPVKSSPTTSVPAVSSPPMGN#QSGQSVP.- | 0.8555 |
| IPI00217267 | K.IENYIN#ESTEAQSEQK.E | 0.7729 |
| IPI00217267 | K.LHCNSACLTN#TTHCPEEASVGNPEGAFMKVLQARKN.Y | 0.72 |
| IPI00217272 | M.GHN#FSLPVYKGEIQAR.N | 0.5381 |
| IPI00217309 | R.VLYM*FNQMPLN#LTNAV.A | 0.8516 |
| IPI00217355 | R.EAFFGGNGKIN#LTVFK.L | 0.869 |
| IPI00217355 | K.DN#STACSHPVTK.H | 0.9644 |
| IPI00217370 | K.HELGITAVMNFQTEWDIVQN#SSGCNR.Y | 0.6828 |
| IPI00217378 | K.KVDAQSSAGKEDM*LLSKSPSSLSAN#ISSSPK.G | 0.9212 |
| IPI00217391 | L.FDNAAQPYSN#LSNLDVLNQVIRERDTK.L | 0.8792 |
| IPI00217438 | M.AKSALREN#GTNSETFRQRFR.R | 0.9696 |
| IPI00217442 | S.QELNFVM*DVN#SSK.Y | 0.8408 |
| IPI00217446 | R.VSTVYANN#GSVLQGTSVASVYHGK.I | 1 |
| IPI00217465 | K.ALAAAGYDVEKN#NSR.I | 0.5791 |
| IPI00217542 | R.SCCEGM*ICNVELPTN#HTNAVFAVM*HAQR.T | 0.5205 |
| IPI00217544 | K.HM*PPPN#MTTNERR.V | 0.513 |
| IPI00217652 | K.FN#STQIAAM*APEHEEPR.I | 0.7554 |
| IPI00217652 | H.PYYGKTGVNSGVMLM*N#M*TRM*RRK.Y | 0.9849 |
| IPI00217669 | C.LQKGSLTIQQVNDLLDSIASN#NSAK.R | 0.9484 |
| IPI00217710 | K.GNSKAGN#GTLENQK.G | 0.6136 |
| IPI00217710 | K.EVDIEGITVIEVGLDPSNN#MTLAVDCVGILKLR.N | 0.9291 |
| IPI00217766 | K.ANIQFGDN#GTTISAVSNK.A | 0.698 |
| IPI00217797 | K.HSAGSGAEESN#SSSTVQK.Q | 0.9156 |
| IPI00217809 | K.GFN#WSSALTKHK.R | 0.5579 |
| IPI00217851 | K.TVN#LSVTPSPAPR.T | 0.6436 |
| IPI00217872 | K.FN#ISNGGPAPEAITDK.I | 0.8006 |
| IPI00217876 | R.VEN#GSSDEN#ATALPGTWR.R | 0.6182 |
| IPI00217884 | T.ERLLGEASSN#WSQAK.R | 0.8245 |
| IPI00217897 | R.GPVSSDVEEN#DSLNLLGILPN#NSDSAKK.N | 0.7341 |
| IPI00217937 | R.VEYTGHPLEIAVFLNYCTVCN#VTK.K | 0.8099 |
| IPI00217975 | M.N#TSTVNSAR.E | 0.8875 |
| IPI00217991 | K.DKLDETN#NTLRCLK.L | 0.9003 |
| IPI00217998 | R.AAEN#ASLGPTN#GSKLM*NR.Q | 0.5164 |
| IPI00218052 | K.AFAADTGM*N#RSQSEYCNVGTKT.Y | 0.7731 |
| IPI00218064 | K.SWN#KSQNDCAIN#NSYLMVIQDITAM*VR.F | 0.5421 |
| IPI00218081 | R.FIDSSNPGLQISLNVN#NTEHVVS.I | 0.7522 |
| IPI00218093 | K.GRIGVVISSYM*HFTN#VSASADQALDR.F | 0.8862 |
| IPI00218130 | R.GLAGVEN#VTELK.K | 0.9988 |
| IPI00218132 | R.EGGHDVPSNKDVTSLDWNTN#GTLLATGSYDGFAR.I | 0.8776 |
| IPI00218135 | K.KHHHHAVGLN#LSHVRKR.C | 0.9298 |
| IPI00218189 | R.DVMWEN#YSNFISLGPSISKPDVITLLDEER.K | 0.7125 |
| IPI00218192 | K.LPTQN#ITFQTESSVAEQEAEFQSPK.Y | 1 |
| IPI00218192 | K.AFITN#FSMNIDGM*TYPGIIK.E | 1 |
| IPI00218288 | R.RLRIHNLGLN#CSSQLADLYKSC.E | 0.8439 |
| IPI00218337 | R.VFPYISAMVNN#GSLSYDHERDGR.P | 0.9949 |
| IPI00218413 | K.DVQIIVFPEDGIHGFN#FTR.T | 1 |
| IPI00218413 | R.YQFNTNVVFSNN#GTLVDR.Y | 1 |
| IPI00218413 | K.NPVGLIGAEN#ATGETDPSHSK.F | 1 |
| IPI00218413 | R.FN#DTEVLQR.L | 0.9997 |
| IPI00218413 | K.WNVNAPPTFHSEMMYDN#FTLVPVWGK.E | 0.5565 |
| IPI00218490 | K.CVVEMEGN#QTVLHPPPSNTK.Q | 0.5427 |
| IPI00218490 | D.YQVTLQIPAAN#LSANR.K | 0.6812 |
| IPI00218529 | R.ASLN#HSTAFNPQPQSQMQDTR.Q | 0.6734 |
| IPI00218571 | K.YNN#GSTELHSSSVGLAK.A | 0.5342 |
| IPI00218648 | K.NEKN#GTDELDNMN#STERISFLQEKLQEIRK.Y | 0.7548 |
| IPI00218676 | K.FIHNENGAN#YSVTATR.S | 0.9775 |
| IPI00218725 | D.LLRTLN#DTLGKLSAIPN#DTAAKLQAVK.D | 0.8184 |
| IPI00218725 | K.N#ESGIILLGSGGTPAPPR.R | 0.876 |
| IPI00218725 | R.YM*QN#LTVEQPIEVK.K | 0.7963 |
| IPI00218731 | K.FVDTAGN#FSFPVN#FSLSLL.N | 0.7538 |
| IPI00218732 | R.VVAEGFDFANGIN#ISPDGK.Y | 1 |
| IPI00218732 | K.VTQVYAEN#GTVLQGSTVASVYK.G | 1 |
| IPI00218732 | K.HAN#WTLTPLK.S | 1 |
| IPI00218762 | R.LSSSGSN#CSSGSEGEPVALHAGICVR.Q | 0.697 |
| IPI00218795 | R.DN#YTDLVAIQNK.A | 1 |
| IPI00218795 | K.IGGIWTWVGTN#K.S | 0.9987 |
| IPI00218803 | R.CATPHGDN#ASLEATFVK.R | 1 |
| IPI00218829 | R.EN#LSAAFSRQLNVNAKPFVPNVHAA.E | 0.8352 |
| IPI00218832 | K.YHVMAPALSFHMSPWSWSN#CSRK.Y | 0.5001 |
| IPI00218888 | R.SGQVEVN#ITAFCQLIYPGK.G | 0.8154 |
| IPI00218889 | M.IN#NTKAFIHHELLAYLYSSADQSSLMEESADQAQR.R | 0.8667 |
| IPI00218916 | K.AN#ATGGGGHVQMVQR.A | 0.6597 |
| IPI00218924 | G.EN#GTLSR.E | 0.551 |
| IPI00218925 | R.N#GSLQEKLWAILQATYIHSWNLARFVFTYK.G | 0.8472 |
| IPI00218964 | K.GFSQLSN#LTK.H | 0.5542 |
| IPI00218987 | I.FN#ETKN#PTLTR.R | 0.8742 |
| IPI00218987 | S.FSWSGGAFLYPPN#MSP.T | 0.6366 |
| IPI00219050 | D.RPPSPTDN#ISRYSFDNLPEK.Y | 0.7622 |
| IPI00219074 | M.TLTN#LSGPYSYCN#TTLDQIGTCWPR.S | 0.8586 |
| IPI00219078 | M.TM*ALSVLVTIEMCNALNSLSEN#QSLLR.M | 0.5952 |
| IPI00219130 | R.MIRTNEAVPKTAPTN#VSGRSGRR.H | 0.6745 |
| IPI00219131 | K.TVVTYHIPQN#SSLENVDSR.Y | 1 |
| IPI00219173 | K.EN#PSTVGVER.V | 0.8501 |
| IPI00219294 | A.DGAAASNAADSAN#ASLVNAK.Q | 0.5289 |
| IPI00219314 | R.N#PSSAAPVQSRGGIGASENLENPPKMGEEE.A | 0.5677 |
| IPI00219336 | K.EN#ITDPPRGCVGNTNIWKTGPLFK.R | 0.562 |
| IPI00219336 | R.TM*N#FTYEVHLVADGK.F | 0.5344 |
| IPI00219418 | P.PTLHATAASVAVPN#KTC.- | 0.5068 |
| IPI00219425 | R.PVDKPIN#TTLICN#VTNALGAR.Q | 1 |
| IPI00219438 | R.LVRVTYVSSEGGHSGQTEAPGN#ATSAM*LGPLSSSTTYTVR.V | 0.6163 |
| IPI00219546 | R.AGVVFMAGHVYAVGGFN#GSLR.V | 0.727 |
| IPI00219561 | R.SQSLIFLN#LSTNNLLD.D | 0.7636 |
| IPI00219561 | K.M*N#LTQNTLGYEGIVKLYKVLK.S | 0.6044 |
| IPI00219567 | M.TAM*DN#ASKN#ASEMIDKLTLTFN#R.T | 0.6677 |
| IPI00219616 | R.N#CTIVSPDAGGAKRV.T | 0.6361 |
| IPI00219677 | F.IKTSTGKETVN#ATFPVAIVM*LR.A | 0.5344 |
| IPI00219678 | K.EALRAGLN#CSTENMPIK.I | 0.6587 |
| IPI00219695 | K.LQNAENDYIN#ASLVDIEEAQR.S | 0.7258 |
| IPI00219753 | M.LQYGGRN#RTVATPSHGVWDMRGK.Q | 0.9978 |
| IPI00219778 | G.VSLSSYLEGLMASTISSN#ASKGREAMEWVIHK.L | 0.7098 |
| IPI00220106 | K.EIYHQNVQN#LTHLQVVEVLK.Q | 0.9044 |
| IPI00220113 | R.LATN#TSAPDLK.N | 0.5931 |
| IPI00220279 | K.ARKSIAQSGVNM*CNQN#SSPHK.N | 0.5215 |
| IPI00220289 | K.VLN#HSPMSDASVNFDYK.S | 0.5346 |
| IPI00220289 | K.LILSQN#HSDEEEEEEENEEENLAMAVGM*GE.R | 0.7406 |
| IPI00220289 | R.EHGAQAGEGALKDSNN#DTN.- | 0.5987 |
| IPI00220327 | E.ESRM*SGECAPN#VSVSVSTSHTTISGGGSR.G | 0.9876 |
| IPI00220391 | N.EINN#MSFLTADN#K.S | 0.6322 |
| IPI00220477 | K.WRLSN#NSVVEIASLR.F | 0.5223 |
| IPI00220573 | K.N#PTDEYLDAM*M*NEAPGPIN#FT.M | 0.956 |
| IPI00220630 | K.VLN#GTLLM*APSGCK.S | 0.6459 |
| IPI00220817 | K.GRAN#HSAFLFGFGDGGGGPTQTM*LDR.L | 0.9349 |
| IPI00220830 | K.SPIIPECSTNVQTAAGGSN#SSQYNSN#LTIRLSVSWK.G | 0.7428 |
| IPI00220901 | R.QSSSEQCSN#LSSVR.R | 0.9976 |
| IPI00221035 | K.LGVNN#ISGIEEASNMFT.N | 0.5057 |
| IPI00221055 | T.TN#STN#PSPQGSHSAIGLSGLN#PSTG.- | 0.5081 |
| IPI00221130 | M.FCINICTVYCN#NSFPIHSSN#STK.K | 0.8358 |
| IPI00221193 | R.N#VTVGPPENIEVTPGEGSLIIR.F | 0.682 |
| IPI00221224 | R.N#ATLVNEADKLR.A | 0.9987 |
| IPI00221224 | R.PSAIAAGHGDYALN#VTGPILNFFAGHYDTPYPLPK.S | 1 |
| IPI00221224 | K.GPSTPLPEDPNWN#VTEFHTTPK.M | 1 |
| IPI00221224 | K.AEFN#ITLIHPK.D | 0.9998 |
| IPI00221224 | K.VPVTLALN#NTLFLIEER.Q | 0.9152 |
| IPI00221224 | E.KNKNAN#SSPVASTTPSASATTNPASATTLDQSK.A | 0.6663 |
| IPI00221234 | R.EENEGVYN#GSWGGR.G | 0.518 |
| IPI00221246 | H.AATTQYAN#GTVLSGQTTNIVTHR.A | 0.8126 |
| IPI00221307 | R.GTELDDGIQADSGPIN#DTDANPR.Y | 0.6039 |
| IPI00221325 | S.QSGHMLLN#LSR.G | 0.6875 |
| IPI00221332 | K.AENDENGQAEN#FSM*DPQLERQVETIR.N | 0.5238 |
| IPI00221338 | M.LTTHPSLYRVDN#LSDEGALN#ISDR.T | 0.504 |
| IPI00232047 | R.IVTTN#VTMPEGPPQNCVTGN#ITGK.S | 0.6369 |
| IPI00232311 | L.TKRTNMDFSICISN#ITPADAGTYYCVK.F | 0.6504 |
| IPI00232837 | R.RKLAIENTMAXLVSVGANSAVN#NTAESK.M | 0.6462 |
| IPI00232917 | K.RSPIFFNYLYSPLEIEALKPNVN#VSSLK.K | 0.5956 |
| IPI00232917 | R.ACLGLIYTVYVDSLN#VSLESLIANLCACLVPAA.G | 0.6628 |
| IPI00233062 | P.TN#ETTFAK.L | 0.5199 |
| IPI00233501 | R.RIN#MSFVEVKDK.K | 0.5329 |
| IPI00233618 | K.YALIIVM*M*TIM*TATDIQLLN#QTMENTR.Q | 0.8842 |
| IPI00234002 | K.VGAERNVLIFDLGDDTFN#VSILTTEDGIFEVK.S | 0.9519 |
| IPI00234035 | K.KEIYM*HTGN#SSTPRGEGGSC.Y | 0.6357 |
| IPI00234091 | R.IPSYN#LTVSVSDNYGAPPGAAVQAR.S | 0.9418 |
| IPI00234337 | K.YFWN#DTIHNFDFLK.G | 0.869 |
| IPI00234446 | R.QYKDLWN#MSDDKPFLCTAPGCGQ.R | 0.9067 |
| IPI00235307 | K.N#SSLAEFVQN#LSQ.I | 0.7697 |
| IPI00235412 | P.VKLGIIGVVN#RSQLDINNKK.S | 0.516 |
| IPI00235721 | M.RPHEDLSEDN#SSGEVVMRVTSV.- | 0.6184 |
| IPI00235756 | K.ALDPSQPVTFVTN#STYAADKGVNK.E | 0.8329 |
| IPI00235832 | T.DDTN#VTWLQLETEIEALKEELLLM*KK.N | 0.5479 |
| IPI00236481 | R.DRLALAN#ESGVTLMPDGSLHLAALPSR.R | 0.5621 |
| IPI00236852 | K.VLTPEELLYRAVQSVN#VTHDAVH.A | 0.6419 |
| IPI00238209 | M.FN#ISPGAVQF.- | 0.5901 |
| IPI00238575 | R.NSINVFASPAHYTSTTGSCNFETSSGN#WTTA.C | 0.8781 |
| IPI00238781 | R.EACANILIDSGADPNIVGVYGNTAVHYAVNSEN#LSVVAK.L | 0.7623 |
| IPI00239216 | K.N#SSSEQLFSSARLQNEK.K | 0.5697 |
| IPI00239405 | R.TNVLNDAYEN#LTRYK.E | 0.6296 |
| IPI00239992 | M.CVETFSN#YSLLGHFAVR.H | 0.6302 |
| IPI00240401 | V.ILSNNN#HTEIQEISLALR.S | 0.6262 |
| IPI00240812 | R.M*ETVSN#ASSSSN#PSSPGR.I | 0.663 |
| IPI00240988 | K.ECQHGGQCQVEN#GSAVCVC.Q | 0.849 |
| IPI00241148 | R.VLYM*FNQMPLN#LTNAVATAL.Q | 0.9888 |
| IPI00241313 | K.QPVESSEDSTDDSN#SSSGEEE.R | 0.622 |
| IPI00241390 | K.LINYN#NSITNSVYSR.F | 0.5989 |
| IPI00241390 | W.NEDYCKLFKN#ITVEEMNELER.Q | 0.8937 |
| IPI00241802 | R.YTLVFN#SSSERN#VSLTEHKKK.Q | 0.9834 |
| IPI00241809 | R.N#MTLLATIM*SGSTM*SLNHE.A | 0.8965 |
| IPI00242956 | R.SVTLQIYN#HSLTLSAR.W | 1 |
| IPI00242956 | R.FNFQGTCEYLLSAPCHGPPLGAEN#FTVTVANEHR.G | 0.9999 |
| IPI00242956 | K.VTVRPGESVM*VN#ISAK.A | 0.9997 |
| IPI00242956 | R.VITVQVAN#FTLR.L | 0.9991 |
| IPI00242956 | R.YLPVN#SSLLTSDCSER.C | 0.9957 |
| IPI00242956 | R.VVTVAALGTN#ISIHK.D | 0.7561 |
| IPI00242956 | R.GLCVLSVGAN#LTTFDGARGA.T | 0.6825 |
| IPI00242960 | R.KPSPQDIAQAVLRN#FSGK.D | 0.8685 |
| IPI00242960 | R.SHN#ASLHPTPEQCEAVSKFIGECK.I | 0.6224 |
| IPI00243275 | K.NNGFFQKLN#VTEGAMQDLLKEIIK.V | 0.5003 |
| IPI00243295 | K.LVSSSNAMEN#ASHQASVQVESLQEQLNV.V | 0.5118 |
| IPI00243423 | K.HTVSGILSM*ANAGPNAN#SSQFFICAAK.T | 0.8311 |
| IPI00243451 | R.YSKETNIDPSEN#STSNLPNCLINQMLSLN#R.T | 0.7589 |
| IPI00243595 | R.CRELRN#FSSLRAILSALQSNPIYR.L | 0.546 |
| IPI00243984 | K.N#KTSTASSMVASAEQPSGSVEEELSK.K | 0.9238 |
| IPI00244043 | K.HGIEAAFLAMLGLQGNKQVLDLEAGFGAFYAN#YSPK.V | 0.9357 |
| IPI00244116 | K.NYNDHENN#LSAICLVK.L | 0.7134 |
| IPI00244243 | S.QCGKM*ANKAN#TSGDFEK.D | 0.8987 |
| IPI00244477 | R.RGASVN#RTTR.T | 0.7576 |
| IPI00244477 | R.RGASVN#RTTRTN#STPLR.A | 0.7364 |
| IPI00244574 | R.NPPAFGN#VSVIALELLNSGYEFDEGSIIFNQFK.S | 0.9118 |
| IPI00245135 | K.TNNVN#VSSR.V | 0.9087 |
| IPI00246001 | R.KSEIHGAPVLFQN#LSGVHWGYEETK.T | 0.504 |
| IPI00246053 | R.IIPGFMCQGGGFTCHN#GTGGK.S | 0.5369 |
| IPI00246067 | R.LESGM*RN#M*SIHSK.T | 0.5097 |
| IPI00246067 | R.WLGSTGVTCGVRRQISEMNGN#ISR.L | 0.9315 |
| IPI00246676 | R.DSFGAHTYELLAKPGQFIHTN#WTGHGGSVSSSSYNA.- | 0.6455 |
| IPI00246686 | K.IIMLPSALDQLSQLN#IT.Y | 0.7462 |
| IPI00247110 | R.KCQLN#LTDSEN#R.T | 0.8279 |
| IPI00247535 | K.ENIPGDFLCISLVN#SSVQLRYNLGDR.T | 0.8588 |
| IPI00247535 | M.RNLQFTTISLN#FSTTK.T | 0.5147 |
| IPI00247601 | K.YDNSLKIISN#ASCTTNCLAPR.A | 0.659 |
| IPI00247616 | M.DN#VTGGMETSR.Q | 0.9515 |
| IPI00247641 | R.NTFTPGEKVVFTTEINN#QTSKCIK.T | 0.7698 |
| IPI00247659 | -.MDSVAFEDVAVN#FTQEEWALLDPSQK.N | 0.9716 |
| IPI00248101 | K.NAPQN#STQAHSENK.C | 0.605 |
| IPI00248307 | R.SEASN#GSTVAAGTSKSEEGLSSGLGSGVGGK.P | 0.8167 |
| IPI00248651 | G.AEVKFVLKHQN#VSEFASSSGGSQLLFK.Q | 0.8866 |
| IPI00248881 | R.KN#CSQIALFQK.R | 0.7556 |
| IPI00248896 | K.STN#ISFTDMVSADER.L | 0.515 |
| IPI00248930 | K.MN#SSIMAN#VTKAFVGDSK.D | 0.6629 |
| IPI00249283 | K.HGSNNVGLSEN#LTDGAAAGNGDGGLVPQR.K | 0.8945 |
| IPI00249584 | M.SVTFISN#NTAIQELFRFR.C | 0.8754 |
| IPI00249629 | K.NRVQSKISN#LTDAKNPNLR.K | 0.9153 |
| IPI00249660 | R.NRDLN#NSSIN#LTKVK.I | 0.9934 |
| IPI00249983 | M.ATRTLN#LSFFPR.S | 0.638 |
| IPI00251351 | R.GTRARLLSSFLSFLN#GSSANQAVGQGPEAGEGR.G | 0.7762 |
| IPI00252768 | R.NILDALM*LN#TTR.I | 0.9998 |
| IPI00252944 | L.TRLQLDGNQITN#LTDSSFGGTNLHSLR.Y | 0.6688 |
| IPI00254338 | R.ELAITDSEHSDAEVSCTDN#GTFN#LSR.G | 0.7141 |
| IPI00255107 | K.IKLRSAMYLSN#TTVTILANLVPFTL.T | 0.8915 |
| IPI00255653 | R.DN#LSGLSADM*QDYGLIIDGAALSLIM*KP.R | 0.7665 |
| IPI00256859 | K.EEEELAYDWSDN#NSN#ISAKR.N | 0.9261 |
| IPI00257076 | K.RYGFYN#NSVIIFSSDNGGQTFSGGSNWPLRGR.K | 0.9458 |
| IPI00257239 | R.ESWGQESNAGN#QTVVR.V | 0.7542 |
| IPI00257508 | R.TTQRIVAPPGGRAN#ITSLG.- | 0.5053 |
| IPI00257544 | R.LN#TTNAWDAAPPSLGSQPLYRSSLS.H | 0.857 |
| IPI00257544 | K.SIGPEHN#GSMVRNK.C | 0.5589 |
| IPI00257717 | T.LTHATNFLNVMLQSN#K.S | 0.5343 |
| IPI00258331 | M.YVDNN#RSWFMHCNSHTN#R.T | 0.5311 |
| IPI00258407 | -.MEN#GSYTSYFILL.G | 0.516 |
| IPI00258462 | K.DSESMSFSDLENWAVAN#SSEPQLEDAKR.E | 0.5437 |
| IPI00258993 | R.VMISAGNLQLPVEAGLVEFTN#ISQK.L | 0.6373 |
| IPI00259549 | K.SNGLMFTNIM*M*QNTN#PSASPEYMFSSNIEPEPK.D | 0.6018 |
| IPI00260178 | R.GQLGGGYGGASGMGGITTVTVN#QSLLSPLNLEVDP.H | 0.6815 |
| IPI00260211 | K.GLYQGFN#MSVQGIIIYR.A | 0.5976 |
| IPI00260230 | K.YTEVTDINSVDANYN#SSVLVSGDDFGLVKLFK.F | 0.7909 |
| IPI00260367 | K.TPCMPQAASN#TSLGLGDLR.V | 0.9941 |
| IPI00260715 | R.GGSGGGGGGGGGGYN#R.S | 0.5968 |
| IPI00260916 | R.RGASVN#CTTRTN#STPLR.A | 0.8966 |
| IPI00288960 | -.M*M*QESATETISN#SSM*NQNGM*STLSSQLDAGSR.D | 0.6344 |
| IPI00289006 | R.DGKEPQPSAEAAAAPSLAN#ISCFTQK.L | 0.9174 |
| IPI00289033 | R.YDN#VTILFSGIVGFNAFCSKHASGEGAM*KIVNL.L | 0.9169 |
| IPI00289082 | R.N#YSKSTELPGKN#ESTIEQIDK.K | 0.526 |
| IPI00289083 | R.FYKFN#TSLAGDLTNLVHGSH.C | 0.5808 |
| IPI00289083 | A.ENRN#PSCEVHQEPVTYTAIDPGLQDALHQCVNSR.C | 0.6401 |
| IPI00289123 | R.M*WRRATAAGNSVVQVVN#VSRLEGDDNPVQL.I | 0.6161 |
| IPI00289169 | R.SMQQQETNLLAN#LTTNDAR.D | 0.9053 |
| IPI00289171 | R.SITN#ASAAIAPKDNLFIRFLK.P | 0.8389 |
| IPI00289258 | R.CSVGTYN#SSGAYR.F | 0.5269 |
| IPI00289301 | K.IM*CLDEKIDN#FTR.Q | 0.7027 |
| IPI00289334 | K.HVGNQQYN#VTYVVKER.G | 0.876 |
| IPI00289346 | R.VLN#ASAEAQRAAAR.F | 0.7325 |
| IPI00289438 | R.AFSQNAN#LTK.H | 0.7426 |
| IPI00289499 | R.N#LTALGLNLVASGGTAKALR.D | 0.5452 |
| IPI00289561 | K.KHAYCSN#LSFR.L | 0.5106 |
| IPI00289561 | R.VLN#ASTLALALANLN#GSR.Q | 0.9283 |
| IPI00289709 | M.N#NSQGRVTFEDVTVN#FTQGEWQR.L | 0.5278 |
| IPI00289776 | K.VN#GTITFIDEIHNDDGVWLRLN.D | 0.8766 |
| IPI00289787 | K.CNLCLAM*NLQGRHKCIEN#VSR.Q | 0.5624 |
| IPI00289799 | K.IKRN#FSSGTIPGTPGPNGEDGVEQTAIK.V | 0.8639 |
| IPI00289802 | R.HCSVN#GTWTGSDPECLVINCGDPGIPANGLR.L | 0.5171 |
| IPI00289809 | K.LLKSIPLDVVLSNNN#HTEIQEISLALR.S | 0.9424 |
| IPI00289831 | P.RFSILPMSHEIM*PGGN#ITCVAVGSPM*PYVK.W | 0.9504 |
| IPI00289866 | M.MQQTPCYSFAPPN#TSLNSPSPNYQK.Y | 0.6239 |
| IPI00289880 | R.GSQSYYTVAHAISEWVEKQSALLIN#GTLK.H | 0.823 |
| IPI00289914 | L.SQFADN#TTYAK.V | 0.931 |
| IPI00289944 | K.FIKNQHCTN#ISELSN#TSEN.D | 0.9668 |
| IPI00289961 | L.LEGQDSGNSNGN#ASIN#ITDISR.N | 0.8835 |
| IPI00290032 | Q.N#ITEEIPM*EVFK.E | 0.8058 |
| IPI00290033 | Q.GWPRPLTPPAAGGLQN#HTVGIIVK.T | 0.5019 |
| IPI00290035 | R.GSSNPLLTTEEAN#LTEK.E | 0.5068 |
| IPI00290043 | Q.ALEN#HTEVQFQK.E | 0.936 |
| IPI00290135 | K.AVSLSVTVPVSHPVLN#LSSPEDLIFEGAK.V | 0.9684 |
| IPI00290155 | R.EHMESNLFLSCATN#QSPVEK.D | 0.7117 |
| IPI00290158 | K.TQLN#SSSLQKLFR.E | 0.5534 |
| IPI00290283 | R.FGYILHTDN#R.T | 0.998 |
| IPI00290283 | K.M*LNN#NTGIYTCSAQGVWM*NK.V | 1 |
| IPI00290283 | R.LEPEGPAPHM*LGLVAGWGISNPN#VTVDEIISSGTR.T | 0.9919 |
| IPI00290292 | R.ELDLPSQDN#VSLTSTETPPPLYV.G | 0.914 |
| IPI00290328 | R.YN#ATVYSQAAN#GTEGQPQAIEFR.T | 1 |
| IPI00290328 | K.IHVAGETDSSNLN#VSEPR.A | 0.9948 |
| IPI00290350 | V.N#LSLIFIIALGSIAGILFVTM*IFVAIKCK.R | 0.6995 |
| IPI00290391 | D.DVNVEIVFLHN#ISPNLELEALFK.R | 0.7585 |
| IPI00290459 | V.M*FLFQGNN#GTVLYTGDFR.L | 0.9278 |
| IPI00290546 | R.KEGN#FSDLK.E | 0.7401 |
| IPI00290547 | R.SYFVVVN#HSQSQDTVTTGEALNVIPGAQEKK.A | 0.7896 |
| IPI00290561 | K.QNPMAN#YSSIPAEIM*DHSISPFM*R.K | 0.5321 |
| IPI00290652 | K.SEEQPMDLEN#RSTANVLEETTVK.K | 0.6119 |
| IPI00290671 | A.RDSN#VTLAPSGPK.G | 0.7713 |
| IPI00290837 | R.EENN#ISGLNQDITDVCFSPEK.D | 0.6274 |
| IPI00290854 | R.GTSGQPPEGCAAPTVIVSNHN#LTDTVQNK.Q | 0.8369 |
| IPI00290856 | K.ANQQLN#FTEAK.E | 0.9998 |
| IPI00290856 | I.ETKVVKEEKAN#DSNPNEESKK.T | 0.5241 |
| IPI00290889 | K.EMTNEEKNIITN#LSK.C | 0.625 |
| IPI00290928 | R.VFSN#VSIILFLN#K.T | 0.8545 |
| IPI00290952 | T.ATHPPGPAVQLN#KTPSSSK.K | 0.5596 |
| IPI00290954 | K.GVHSFYNN#ISGLTDFGEK.V | 1 |
| IPI00291003 | R.SN#KTLADSLDNANDPHDPIVNR.L | 0.9961 |
| IPI00291170 | T.VKGN#PSSSVEDHIEYHGHR.G | 0.564 |
| IPI00291200 | M.IFETTTKN#ETIAQEDK.I | 0.9155 |
| IPI00291235 | R.RFIPPARMMSTESANSFTLIGEASDGGTMEN#LSR.R | 0.631 |
| IPI00291262 | R.LAN#LTQGEDQYYLR.V | 1 |
| IPI00291262 | K.ELPGVCN#ETM*M*ALWEECKPCLK.Q | 1 |
| IPI00291262 | R.EILSVDCSTNN#PSQAK.L | 0.9997 |
| IPI00291262 | K.MLN#TSSLLEQLNEQFNWVSR.L | 0.9994 |
| IPI00291262 | R.HN#STGCLR.M | 0.9992 |
| IPI0029I262 | K.EDALN#ETR.E | 0.9978 |
| IPI00291262 | R.QLEEFLN#QSSPFYFWMNGDR.I | 0.9732 |
| IPI00291316 | M.CYACN#KSITAKEALICPTCN#VTIHNR.C | 0.5668 |
| IPI00291387 | K.NIGDDGGGDDNTFN#FSWK.V | 0.7116 |
| IPI00291410 | K.WFN#NSAASLTM*PTLDNIPFSLIVSQD.V | 0.9022 |
| IPI00291539 | K.QRM*EPLYSLN#VSVSDGLFTSTAQVHIR.V | 0.9622 |
| IPI00291596 | R.QHN#NTGYIYSRDQWDPEVIENHRKK.K | 0.9347 |
| IPI00291827 | R.TIGIFWLN#ASETLVEINTEPAVEYTLTQM*GPVAAKQK.V | 0.9627 |
| IPI00291834 | R.SASLSSLLITPFPSPN#SSLTRSCASSYQR.R | 0.757 |
| IPI00291860 | R.GPHHLDN#SSPGPGSEARGINGGPSRMSPK.A | 0.6965 |
| IPI00291866 | R.DTFVN#ASR.T | 0.9997 |
| IPI00291866 | R.VLSN#NSDANLELINTWVAK.N | 1 |
| IPI00291866 | K.VGQLQLSHN#LSLVILVPQNLK.H | 1 |
| IPI00291866 | K.M*LFVEPILEVSSLPTTN#STTNSATK.I | 1 |
| IPI00291866 | R.ASSNPN#ATSSSSQDPESLQDR.G | 0.9404 |
| IPI00291867 | R.SIPACVPWSPYLFQPN#DTCIVSGWGR.E | 0.9998 |
| IPI00291867 | K.LISN#CSK.F | 0.7403 |
| IPI00291897 | K.FSIAILPFSIKAMAEAN#VSLRRMK.K | 0.8243 |
| IPI00291910 | R.CN#TTQGNEVTSILRW.A | 0.5105 |
| IPI00291916 | K.HSKALNTLSSPGQSSFSHGTRN#NSAK.E | 0.8113 |
| IPI00291916 | K.KRN#RSSSVSSSAASSPERK.K | 0.7713 |
| IPI00291919 | K.AN#FSIGPMMPVLAGT.Y | 0.9331 |
| IPI00291922 | K.ARVETQNHWFTYN#ETM*TVESVTQAVSNLALQF.G | 0.8769 |
| IPI00291929 | K.TN#RSSVKTPKPVEPAASDLE.P | 0.9952 |
| IPI00291936 | M.RVN#NSTMLGASGDYADFQYLK.Q | 0.6561 |
| IPI00291990 | R.LLGHSPVLRN#ITNSQAPDGRR.K | 0.8077 |
| IPI00292011 | R.N#GSDDPSYNGAIIVSGDQK.D | 0.6457 |
| IPI00292043 | R.ISWEEYN#RTNTRVTHYLPN#VTLEYR.V | 0.6417 |
| IPI00292071 | K.LEKN#ATDN#ISK.L | 0.814 |
| IPI00292218 | R.GTAN#TTTAGVPCQR.W | 0.9841 |
| IPI00292218 | K.GTGN#DTVLNVALLNVISNQECNIK.H | 1 |
| IPI00292218 | R.AFHYN#VSSHGCQLLPWTQHSPHTR.L | 0.9996 |
| IPI00292300 | P.SLLLFIN#SSSQDFVVVLLCK.N | 0.9834 |
| IPI00292323 | R.NVNFN#GSAGTPVMFNKNGDAPGR.Y | 0.6716 |
| IPI00292393 | K.EGLLANTM*SKMYGHENGN#SSSPSPEEK.G | 0.8317 |
| IPI00292471 | R.SITKNPKIGGLPLIPIQHEGN#ATLAR.K | 0.7607 |
| IPI00292487 | M.LQDIQEVLN#RSK.S | 0.7645 |
| IPI00292496 | K.MSATFIGN#NTAIQELFK.R | 0.9893 |
| IPI00292499 | R.IRN#ISNTVM*KVKQILGR.S | 0.6243 |
| IPI00292530 | K.ICDLLVANNHFAHFFAPQN#LTNMNK.N | 0.9997 |
| IPI00292530 | R.AN#LSSQALQM*SLDYGFVTPLTSMSIR.G | 1 |
| IPI00292537 | K.LM*PN#FSDSFGGGSGAGAGGGGMFG.S | 0.8399 |
| IPI00292674 | K.SQLGFLN#VTNYCHLAHELRLSCMERK.K | 0.6708 |
| IPI00292723 | M.FEHFLLHREGMFN#DTLR.L | 0.9872 |
| IPI00292723 | S.VTGN#PSNSWPSPTEPSSETGNPR.H | 0.576 |
| IPI00292737 | L.PLN#ESADITFATLNTKGNEGDIVR.D | 0.5968 |
| IPI00292746 | R.LN#TTNAWGAAPPSLGSQPLYR.S | 0.7378 |
| IPI00292819 | R.EGELCSLLKEN#VSELRILSSGNDHGNWCIIAEKK.G | 0.7925 |
| IPI00292824 | R.NTPWTPWLPVN#VTQGGARQEQR.F | 0.9102 |
| IPI00292859 | K.EAPYFYN#DTVTFK.C | 0.9999 |
| IPI00292859 | K.TPNGN#HTGGNIARF.S | 0.5538 |
| IPI00292907 | Y.LFVIFDFLIGVLIFATIVGNVGSM*ISNM*N#ATR.A | 0.7059 |
| IPI00292928 | R.TKDAGLGVYSLALLNN#VSYNVVEFSK.S | 0.5167 |
| IPI00292946 | K.VTACHSSQPN#ATLYK.M | 1 |
| IPI00292946 | K.TLYETEVFSTDFSN#ISAAK.Q | 1 |
| IPI00292946 | K.TTTVQVPMMHQM*EQYYHLVDM*ELN#CTVLQMDYSK.N | 0.9936 |
| IPI00292950 | K.DFVN#ASSK.Y | 0.9968 |
| IPI00292950 | K.N#LSM*PLLPADFHK.E | 0.9996 |
| IPI00292953 | R.RAELVCLN#NTEISEN#SSDLSQKLK.E | 0.8791 |
| IPI00293057 | K.QVHFFVN#ASDVDNVK.A | 1 |
| IPI00293057 | K.AHLN#VSGIPCSVLLADVEDLIQQQISN#DTVSPR.A | 1 |
| IPI00293086 | R.NN#QTIFEQTINDLTFDGSFVK.E | 0.7167 |
| IPI00293173 | R.GYLQALASKMTEELEALRN#SSLGTR.A | 0.8526 |
| IPI00293183 | M.QAPAFRDKKQGVSAKNQGAHDPDYEN#ITLAFK.N | 0.6116 |
| IPI00293203 | M.FTMATAEHRSN#SSIAGK.M | 0.6155 |
| IPI00293274 | R.LPQDGDN#VTVENGQLLLLDTN#TSILNLLHIK.G | 0.7351 |
| IPI00293274 | R.WQIVPN#ASSPFGFWS.Q | 0.7022 |
| IPI00293328 | R.ETGDN#FSDVAIQGGIMGIE.I | 0.5343 |
| IPI00293381 | M.GMIFTLFTIN#VSTDM*R.H | 0.9229 |
| IPI00293426 | K.RLAYLLQQTDEYVAN#LTELVPQHK.A | 0.685 |
| IPI00293471 | M.NKWAGLLGPISN#HSFGGSFRTASNK.E | 0.909 |
| IPI00293471 | K.LFSDIEN#ISEETSAEVHPIS.L | 0.9214 |
| IPI00293471 | K.LSNNLNVEGGSSENN#HSI.K | 0.6898 |
| IPI00293520 | K.SRMAIWAATDHNVDN#TTEIFR.E | 0.9955 |
| IPI00293565 | K.VLLLHEVHAN#DTGSYVCYYK.Y | 0.9993 |
| IPI00293575 | K.SVN#VSSNLVTQEPSPEETSTKR.S | 0.6597 |
| IPI00293583 | K.AGHSNKYLKM*AN#NTKELEVCEQANK.L | 0.9328 |
| IPI00293590 | K.VLAAKVLNLVLPN#LSLGPIDSSVLSR.N | 0.7033 |
| IPI00293602 | R.NYQRIEQN#LTSTASSGTNVHGS.P | 0.7657 |
| IPI00293616 | R.VGNLGLATSFFNEKNM*N#ITK.D | 0.7548 |
| IPI00293714 | I.DN#TTNSMKKTK.S | 0.6257 |
| IPI00293714 | S.LPMSIN#VTDDIVYISTHPEASSR.T | 0.8565 |
| IPI00293748 | K.FLTEVEKN#ATALYHVEAFK.T | 0.9999 |
| IPI00293748 | R.AN#STSDEL.- | 0.6105 |
| IPI00293773 | R.AGM*VYMAGLVFAVGGFN#GSLRVR.T | 0.9811 |
| IPI00293849 | I.TN#LSPYTN#VSVKLILMNPEGRK.E | 0.502 |
| IPI00293921 | R.DLN#VSVTHLIAGEVGSKK.Y | 0.5572 |
| IPI00293925 | R.VELEDFNGN#R.T | 0.9981 |
| IPI00293971 | R.VINFYAGAN#QSM*N#VTCAGK.R | 0.5256 |
| IPI00294004 | L.VSGN#NTVPFAVSLVDSTSEK.S | 0.8514 |
| IPI00294065 | R.LEQQM*NSASGSSSN#GSSIN#MSGIDNGEGTRLR.N | 0.9073 |
| IPI00294073 | R.FRSSGMTLDN#ISR.A | 0.5515 |
| IPI00294125 | K.EN#ETESLQILNAK.T | 0.6675 |
| IPI00294193 | N.QLVDALTTWQN#K.T | 0.9572 |
| IPI00294193 | K.LPTQN#ITFQTESSVAEQEAEFQSPK.Y | 1 |
| IPI00294193 | R.NQALN#LSLAYSFVTPL.T | 1 |
| IPI00294193 | K.AFITN#FSMNIDGMTYPGIIK.E | 0.9988 |
| IPI00294395 | K.EYESYSDFERN#VTEK.M | 1 |
| IPI00294486 | K.SN#ISPNFNFMGQLLDFER.S | 0.9916 |
| IPI00294578 | M.NMGSDFDVFAHITN#NTAEEYVCR.L | 0.6102 |
| IPI00294728 | K.LDDISSN#YTESFSTLDENDLLN#PSEDIIAVQLK.F | 0.9495 |
| IPI00294728 | K.QKPSGLTRSTSMLISSGHN#KSSNSLK.L | 0.7527 |
| IPI00294739 | K.KEWN#DSTSVQN#PTRLR.E | 0.7366 |
| IPI00294744 | R.SQANGAGALSYVSPN#TSK.C | 0.7598 |
| IPI00294776 | R.HDYILLPEDALTN#TTR.L | 0.992 |
| IPI00294776 | R.APSN#VSTIIHILYLPEDAK.G | 0.813 |
| IPI00294787 | M.PPVSLNHN#LTTPFTSQAGENSLF.M | 0.7359 |
| IPI00294798 | R.TKSNSLSEQLAIN#TSPDAVK.A | 0.9417 |
| IPI00294816 | M.VNN#VTPARAVVSLINGGQR.Y | 0.5376 |
| IPI00294879 | M.QKAFN#SSSFNSNTFLTR.L | 0.712 |
| IPI00294903 | K.KRGTFIEFRNGMLN#ISPIGRSC.T | 0.5352 |
| IPI00294943 | M.QQHN#MSWIEVQFLK.K | 0.5639 |
| IPI00294997 | M.VTEMYSGPCVAM*EIQQNN#ATK.T | 0.7213 |
| IPI00295081 | R.VSGLM*M*AN#HTSISSLFER.T | 0.7492 |
| IPI00295182 | K.GGAVAADGRIEPGDM*LLQVNEINFEN#M*SN.D | 0.8753 |
| IPI00295339 | K.AYSWN#ISR.K | 0.5725 |
| IPI00295376 | -.M*DQNQHLN#KTAEAQPSENK.K | 0.5571 |
| IPI00295380 | R.VVNLEALQMLSVN#TTLEELK.I | 0.9781 |
| IPI00295387 | R.N#DSESSGVLYSRAPTYFCGQTLTFR.Q | 0.7118 |
| IPI00295461 | K.DDNLEHYKN#STVMAR.A | 0.9998 |
| IPI00295502 | H.LRQM*GVTEWSVN#GSPIDTLR.E | 0.546 |
| IPI00295503 | K.MM*N#DSILRLQTWDEAVFR.E | 0.5128 |
| IPI00295640 | K.SLKHQNILLEVDDFENRN#GTDGLSYNGAIIVSGK.Q | 0.6525 |
| IPI00295672 | M.KNKRN#VTEFVLTGLTQNPKM*EK.V | 0.7847 |
| IPI00295743 | K.MADALLFGNFGVQN#ITAAIQLYESLAK.E | 0.8936 |
| IPI00295832 | M.TLSITSGM*PNN#FSEM*PQQSTTLNLWR.E | 0.7745 |
| IPI00295988 | P.GNLPPSMN#LSQLLGLRK.N | 0.5407 |
| IPI00296053 | R.INKLM*N#ESLMLVTALNPHIGYDK.A | 0.5051 |
| IPI00296063 | K.N#ISNPEAYDHCFEKK.E | 0.5907 |
| IPI00296099 | G.EDTDLDGWPNENLVCVAN#ATYHCKK.D | 0.7692 |
| IPI00296099 | K.VVN#STTGPGEHLR.N | 1 |
| IPI00296099 | K.VSCPIM*PCSN#ATVPDGECCPR.C | 0.9875 |
| IPI00296099 | K.GCSSSTSVLLTLDNNVVN#GSSPAIRTNYIGHKTK.D | 0.5429 |
| IPI00296161 | K.FIHNENGAN#YSVTATR.S | 0.9775 |
| IPI00296165 | N.LLPICLPDN#DTFYDLGLM*GYVSGFGVM*EEK.I | 1 |
| IPI00296165 | K.EHEAQSN#ASLDVFLGHTNVEELM*K.L | 1 |
| IPI00296165 | K.MLLTFHTDFSNEEN#GTIM*FYK.G | 1 |
| IPI00296165 | R.CN#YSIR.V | 0.9967 |
| IPI00296170 | K.MVSHHN#LTTGATLINEQWLLTTAK.N | 1 |
| IPI00296170 | K.NLFLN#HSEN#ATAK.D | 1 |
| IPI00296211 | R.DKYLHTNCLAALAN#M*SAQFR.S | 0.5587 |
| IPI00296211 | L.LLLLVLAN#LTDASDAPNPYR.Q | 0.8206 |
| IPI00296215 | K.LAAKCLVMKAEMN#GSK.L | 0.503 |
| IPI00296311 | R.YMLASPDVTSILLTYN#LSNTNSCN#VSPKK.E | 0.9247 |
| IPI00296318 | Q.CSSLGAESILSGKEN#SSALSPNHR.I | 0.539 |
| IPI00296362 | R.SPLQACENLAMNEGGPPTEN#NSLILEENK.I | 0.5479 |
| IPI00296421 | R.LRN#SSSFSMDDPDAGAMGAAAAEGQ.A | 0.8203 |
| IPI00296449 | R.TTSTLSLSAEDSQSTESN#MSVPK.K | 0.9536 |
| IPI00296449 | K.ENN#LTEDNPN#LSM*AQRR.H | 0.603 |
| IPI00296485 | M.VDPEM*LPPKTARQTEN#VSR.T | 0.9937 |
| IPI00296495 | K.CIRCAVVGNGGILN#GSR.Q | 0.9495 |
| IPI00296527 | K.KNSDGM*EAAGVQIQM*VN#ESLG.Y | 0.9403 |
| IPI00296534 | R.NCQDIDECVTGIHN#CSIN#ETCFNIQGGFR.C | 0.9998 |
| IPI00296534 | R.CATPHGDN#ASLEATFVK.R | 1 |
| IPI00296573 | R.SPASERRPLGN#FTAPPTYTETLSTAPLASWVR.S | 0.6423 |
| IPI00296594 | K.DPPSEANSIQSAN#ATTKTSETN#HTSR.P | 0.9321 |
| IPI00296608 | R.N#YTLTGR.D | 0.9819 |
| IPI00296608 | K.INNDFNYEFYN#STWSYVK.H | 1 |
| IPI00296776 | K.ERVEN#YSN#VSIHLKNP.E | 0.6446 |
| IPI00296845 | K.SSSTPFPFRTGLTSGN#VTENLQTYIDK.S | 0.7546 |
| IPI00296858 | R.KTENAYNAIINGEAN#VT.G | 0.523 |
| IPI00296866 | K.EIRVLEFRSPKEN#DSGVDVYYAVTFNGE.A | 0.7294 |
| IPI00296869 | K.ATN#ATLDPR.S | 0.8042 |
| IPI00296936 | M.VSFVSN#YSHTANILPDIENEDFIKDCVRIHNKFR.S | 0.78 |
| IPI00296999 | M.HLTTLCN#TSLDN#PTQR.N | 0.7143 |
| IPI00297089 | K.DISSSEMTN#PSDTLNIETLLN#GSVKRVSENNGNGK.N | 0.5533 |
| IPI00297124 | N.PPHN#LSVINSEELSSILK.L | 0.5489 |
| IPI00297124 | R.ETHLETN#FTLK.S | 0.9988 |
| IPI00297210 | K.AGKPVVAAPGAGN#LTKFEPR.A | 0.6356 |
| IPI00297223 | H.SDHDN#STSLNGGK.R | 0.6658 |
| IPI00297242 | R.VLN#TSSLESATDEAGSPLAAAAAAAAAER.C | 0.854 |
| IPI00297252 | R.LFPN#ASQHITPSYNYAPNPDK.H | 0.7442 |
| IPI00297257 | T.RGRSISFPALLPIPGSN#RSSVIM*TAK.P | 0.5512 |
| IPI00297263 | R.ALLSITDN#SSSSDIVESSTSYIK.I | 0.7064 |
| IPI00297263 | K.SHAASDAPEN#LTLLAETADAR.G | 1 |
| IPI00297263 | R.SYSESSSTSSSESLN#SSAPR.G | 0.995 |
| IPI00297263 | R.SN#ISSYDGEYAQPS.T | 0.6318 |
| IPI00297277 | K.NWIALIPKGN#CTYR.D | 0.8069 |
| IPI00297366 | K.KM*LYRDFN#MTGWAYK.T | 0.6371 |
| IPI00297570 | K.EEVQN#LTSVLNELQEEIGAYDYDELQSR.V | 0.9997 |
| IPI00297570 | R.LPHPWSGTGQVVYN#GSIYFNK.F | 0.9999 |
| IPI00297570 | K.VQN#M*SQSIEVLDR.R | 0.9999 |
| IPI00297570 | K.SM*VDFM*NTDN#FTSHR.L | 0.999 |
| IPI00297622 | K.SDNN#YSTPNER.G | 0.5113 |
| IPI00297626 | A.MAYDLLPIEN#DTYK.Q | 0.9433 |
| IPI00297633 | K.ENMN#LSEAQVQALALSR.Q | 0.7336 |
| IPI00297633 | R.RSSEN#M*TAEPMSESKLNTLVQK.L | 0.6802 |
| IPI00297646 | R.LMSTEASQN#ITYHCK.N | 0.8682 |
| IPI00297671 | R.N#LSEGNNAN#YT.E | 0.6528 |
| IPI00297723 | K.DRGVTRFQEN#ASEGKAPAEDVFKK.P | 0.8071 |
| IPI00297763 | M.N#VSGGPITREASKEI.P | 0.7717 |
| IPI00297763 | K.TPSVSPN#ITQLFQK.Q | 0.7169 |
| IPI00297763 | M.N#YSVSAGLVVGIFIGFQK.K | 0.5787 |
| IPI00297897 | M.QELSNILN#LSYK.Q | 0.9162 |
| IPI00297910 | R.THHILIDLRHRPTAGAFN#HSDLDAELR.R | 0.5326 |
| IPI00297921 | R.ISCRPQTQISNNYGNNPLN#SSLLPQK.Q | 0.5078 |
| IPI00297985 | R.EIVSQTTATQEKSQEELPTTN#NSVSK.E | 0.6891 |
| IPI00298031 | K.ISLKIQNCRN#VTSLPCLSLR.K | 0.5194 |
| IPI00298031 | R.APTFLMN#QTDTHIVEK.M | 0.9964 |
| IPI00298216 | K.DTNVQVLM*VLGAGRGPLVN#ASLR.A | 0.6096 |
| IPI00298285 | M.EGTATCN#GSGSDTCAQCAHFR.D | 0.6392 |
| IPI00298337 | R.SLIASGLYGYN#ATLVGVLMAVFSDK.G | 0.8342 |
| IPI00298347 | K.KNPMVETLGTVLQLKQPLN#TTR.I | 0.5988 |
| IPI00298464 | K.M*AAVTLLALAYTQGPVLFN#LTFK.I | 0.7319 |
| IPI00298497 | R.GTAGNALMDGASQLM*GEN#R.T | 0.9775 |
| IPI00298536 | R.DVMLEN#YSNLVSLGLLGPKPDTFSQLEKR.E | 0.7354 |
| IPI00298673 | E.ENTDDN#ITVQGEIRKEDGM*ENLK.N | 0.6622 |
| IPI00298828 | R.DTAVFECLPQHAMFGN#DTITCTTHGN#WTK.L | 0.9998 |
| IPI00298828 | R.VYKPSAGN#NSLYR.D | 1 |
| IPI00298828 | K.LGN#WSAMPSCK.A | 0.9996 |
| IPI00298853 | K.LCDN#LSTK.N | 0.995 |
| IPI00298860 | R.TAGWNVPIGTLRPFLN#WTGPPEPIEAAVAR.F | 0.9959 |
| IPI00298888 | K.NLN#YSVPEEQGAGTVI.G | 0.5438 |
| IPI00298902 | K.KQSNNDLFQVN#STSDDEIPR.K | 0.7548 |
| IPI00298902 | -.M*ASQLQEKCIAFIVDN#FSK.I | 0.9778 |
| IPI00298902 | K.SIHEQDTNVN#NSVLKK.V | 0.8003 |
| IPI00298920 | K.TGGDN#KTLLHLGSSAPGK.E | 0.8688 |
| IPI00298971 | R.N#ISDGFDGIPDNVDAALALPAHSYSGR.E | 1 |
| IPI00298971 | K.NN#ATVHEQVGGPSLTSDLQAQSK.G | 1 |
| IPI00298971 | K.N#GSLFAFR.G | 0.9995 |
| IPI00298980 | N.#TSAPPAVSPN#ITVLAPGK.G | 0.6924 |
| IPI00298994 | R.AATAPLLEAVDN#LS.A | 0.5498 |
| IPI00299059 | R.VTWKPQGAPVEWEEETVTN#HTLR.V | 0.9543 |
| IPI00299059 | R.RYHIYEN#GTLQIN#R.T | 0.9948 |
| IPI00299122 | M.ITMVCCAHSTNEPSN#M*SYVK.E | 0.6482 |
| IPI00299158 | R.VEDEGN#YTCLFVTFPQGSR.S | 0.9958 |
| IPI00299162 | F.GSNMGN#GTVFLGIPGDNK.Q | 0.5758 |
| IPI00299162 | R.IRVDLPLGSPAVN#CTVLPGGIS.V | 0.7538 |
| IPI00299299 | V.LNKNGM*VEFSVTSN#ETITVSPEYVGSR.L | 0.8532 |
| IPI00299377 | R.SVN#GTTSDCLVSLVTSVTN.V | 0.5324 |
| IPI00299435 | R.STERN#VSVEALASALQLLAR.E | 1 |
| IPI00299435 | R.QGGVN#ATQVLIQHLR.G | 0.8233 |
| IPI00299435 | K.DAN#ISQPETTKEGLR.A | 0.548 |
| IPI00299503 | K.LGTSLSSGHVLMN#GTLK.Q | 0.9998 |
| IPI00299503 | K.LNVEAAN#WTVR.G | 1 |
| IPI00299503 | K.FHDVSESTHWTPFLN#ASVHYIR.E | 1 |
| IPI00299503 | R.N#LTTSLTESVDR.N | 0.9996 |
| IPI00299503 | R.NIN#YTER.G | 0.9524 |
| IPI00299503 | R.TLLLVGSPTWKN#ASR.L | 0.5773 |
| IPI00299507 | K.DLQRSLPPVM*AQN#LSIPLAFACLLHLANEK.N | 0.5463 |
| IPI00299512 | R.YMLMLSFN#NSLDVAAH.L | 0.524 |
| IPI00299526 | K.QVPLIPDLN#Q.T | 0.7161 |
| IPI00299526 | K.LRIFYQFLYNN#NTR.Q | 0.6424 |
| IPI00299547 | K.SYN#VTSVLFR.K | 1 |
| IPI00299594 | K.RGPECSQN#YTTPSGVIK.S | 1 |
| IPI00299594 | K.EGFSAN#YSVLQSSVSEDFK.C | 1 |
| IPI00299619 | K.TSATSVN#LSLLTADLYSLFCGLFL.F | 0.5243 |
| IPI00299635 | K.FVLNSN#ITNIP.Q | 0.5209 |
| IPI00299664 | R.VQALDPDEGSNGEVQYSLSN#STQAELR.H | 0.7289 |
| IPI00299778 | R.VSTVYANN#GSVLQGTSVASVYHGKILIGTVFXK.T | 0.603 |
| IPI00299831 | K.N#ASDGALMDDNQNEWGDEDLETKK.F | 0.6047 |
| IPI00299884 | K.LLM*ENPYEGPDSQKEKDSN#SSK.Y | 0.9439 |
| IPI00300020 | K.KVLVAPPPDEEAN#ATSAVVSLLN#ETVTEVPEETK.M | 0.8428 |
| IPI00300078 | K.NN#KSDTLPLATRYN.V | 0.9648 |
| IPI00300078 | R.GNLN#FTCNGNSVISPVGNR.V | 0.9113 |
| IPI00300078 | K.RFEISCN#LSLDAMEEFLNRRK.M | 0.6269 |
| IPI00300117 | P.SSEVMN#KSRCESLLFN#ESMLWENAK.M | 0.6816 |
| IPI00300117 | K.ELQEGN#ETDEAK.T | 0.6902 |
| IPI00300173 | K.LALRN#NSASTTQHLR.L | 0.5401 |
| IPI00300376 | S.AMINSNDDNGVLAGN#WSGTYTGGR.D | 0.8423 |
| IPI00300384 | G.PTQCVN#CSQFLR.G | 0.5345 |
| IPI00300408 | M.KFRN#SSVAMGASLSCSEYSLK.V | 0.7599 |
| IPI00300465 | K.LANN#GTVLR.A | 0.9589 |
| IPI00300573 | R.QFPKLN#ISEVDEQVR.L | 0.5062 |
| IPI00300585 | K.EDGSGSAYDKESMAIIKLN#NTTVLYLK.E | 0.796 |
| IPI00300599 | K.VPLSHSRSN#DTLYIPEWEGR.A | 0.8356 |
| IPI00300631 | R.KRNVDSSGN#KSVLMERL.K | 0.5679 |
| IPI00300813 | M.IN#FSAFLGAATMYTRYK.I | 0.5375 |
| IPI00300838 | R.RLLIKKMPAAATIPAN#SSDAPFIR.P | 0.5065 |
| IPI00300843 | K.QLLRDLSGLQGM*N#GSIQAK.S | 0.5379 |
| IPI00300936 | K.KKDSLHGSTGAVN#ATRPT.L | 0.5997 |
| IPI00301021 | K.DLNGNVFQDAVFN#QTVTVIER.E | 0.8101 |
| IPI00301031 | K.HSSGTSN#TSTAN#RSTHNELEK.N | 0.9056 |
| IPI00301107 | M.GRVLLQN#TSFFSSLLNEMAHK.F | 0.8501 |
| IPI00301143 | K.SLPNFPN#TSATAN#ATGGR.A | 0.9999 |
| IPI00301143 | R.EHYN#LSAATCSPGQM*CGHYTQVVWAK.T | 1 |
| IPI00301180 | -.MPNN#LTDCEDGDGGANPGDGNPK.E | 0.8099 |
| IPI00301180 | K.NM*ALFEEEMDTSPMVSSLLSGLAN#YTNLPQGSR.E | 0.627 |
| IPI00301248 | K.QPTPIAN#TSSQQAVFTSARQLPSAR.T | 0.953 |
| IPI00301248 | K.DQVN#GTSEDSADGSTVGTAVSSSDDADLPPP.P | 0.6801 |
| IPI00301288 | R.CGEPPSIMNGYASGSN#YSFGAMVAYSCNK.G | 0.993 |
| IPI00301480 | K.HPLTAN#ASR.S | 0.9126 |
| IPI00301517 | K.LLYLTTTN#ESGVFITG.H | 0.8678 |
| IPI00301548 | M.SSKHN#MSGGEFQGKR.E | 0.7001 |
| IPI00301548 | M.SGTTTSTNTFPGGPIATLFN#M*SMSIK.D | 0.5976 |
| IPI00301610 | R.KMAHPAMFPRRGSGSGSASALNAAGTGVGSN#ATSSEDFPPP.S | 0.7245 |
| IPI00301793 | A.AQN#NTVTVPK.N | 0.846 |
| IPI00301793 | R.ISKLIN#SSDELQDNFR.E | 0.8615 |
| IPI00301968 | R.DVMLEN#YSHLVSVGYLVAK.P | 0.684 |
| IPI00302029 | R.EVN#STDWDSKMGFWAPLVLSHSR.R | 0.5398 |
| IPI00302311 | -.MEN#FSLLSISGPPISSSALSAFPDIMF.S | 0.7655 |
| IPI00302329 | K.RQAEEAEEQSNAN#LSKFR.K | 0.7454 |
| IPI00302383 | M.NIMSTLQWAVN#SSIDVDSLMRSVSR.V | 0.7038 |
| IPI00302409 | P.AAEHFN#YSVMVDIRELIEVDDVM.E | 0.7079 |
| IPI00302448 | R.DGQLLPSSN#YSNIK.I | 0.9998 |
| IPI00302453 | K.SFGSPPLAVSN#VSAAVMVLMAPRG.R | 0.6889 |
| IPI00302503 | K.N#DSLIQN#DSILESLLEVL.R | 0.7389 |
| IPI00302557 | K.EECRLLNAPPVPPRGGN#GSGR.L | 0.528 |
| IPI00302592 | G.LN#TTGVPASLPVEFTIDAK.D | 0.7334 |
| IPI00302652 | R.IDRM*FPEMSIHLSRPN#GTSAM*LLVTLGK.V | 0.5906 |
| IPI00302717 | K.KLSN#FSFLTHR.Q | 0.7542 |
| IPI00302807 | R.TSEHQVDLKVDPSQPSN#VSHKLWTAA.G | 0.6753 |
| IPI00302965 | R.N#ASLSQSPR.V | 0.9955 |
| IPI00303040 | K.WTN#LSDPMPVGQMGTVK.Y | 0.7499 |
| IPI00303053 | R.ERTSSSIVFEDSGCDN#ASSK.E | 0.5301 |
| IPI00303068 | K.FLAEHPN#VTLTISAARLYYYR.D | 0.917 |
| IPI00303112 | K.LELNPHTVEN#VTKNEDSM*TGIEVEKWTQNKK.S | 0.5739 |
| IPI00303117 | R.FLLNDN#LTLPPEMYVYSTNSDHLPM*TSSFR.K | 0.9436 |
| IPI00303135 | K.SEEN#STVFSHLM*K.Y | 0.9301 |
| IPI00303157 | M.ILN#LTQSSGFNGFTPLVTLLLR.H | 0.8116 |
| IPI00303163 | K.GIAILN#TSVAPMLNPFIYTLR.N | 0.9001 |
| IPI00303283 | R.AKWDTANNPLYKEATSTFTN#ITYR.G | 0.5207 |
| IPI00303313 | K.N#VTLILDCKKK.T | 0.7314 |
| IPI00303325 | K.AGN#ETQISEFLLLGFSEK.Q | 0.8122 |
| IPI00303335 | K.YRTKIETLN#FTPVDDRVDYVTAK.Q | 0.6984 |
| IPI00303335 | M.PDTPDILLAKSNSAN#ISQKLYTK.G | 0.5824 |
| IPI00303389 | -.M*VLASGN#SSSHPVSFILLGIPGLESF.Q | 0.9163 |
| IPI00303402 | K.AIELLM*ETAEVEQNGGLFIMN#GSR.R | 0.5426 |
| IPI00303431 | -.MNLDSFFSFLLKSLIM*ALSN#SSWR.L | 0.7922 |
| IPI00303452 | R.N#LSTCFSSGDL.F | 0.7174 |
| IPI00303455 | N.VGQN#TTR.F | 0.9348 |
| IPI00303458 | -.M*TVRNIASICNMGTN#ASALEK.D | 0.7048 |
| IPI00303463 | M.DTTISIN#NTVITPMLNPIIYSLR.N | 0.9337 |
| IPI00303553 | M.TTENPN#QTVVSHFFLEGLR.Y | 0.9434 |
| IPI00303560 | K.EDSGKIKLLLHWMPEDILPDVWVN#ESER.H | 0.6882 |
| IPI00303581 | M.IILAGIN#FTYSLTVIIISYLFILIAILRM*R.S | 0.5177 |
| IPI00303582 | R.RN#CTLVTEFILLGLTS.R | 0.8218 |
| IPI00303583 | R.VKKM*AMFVVAGFN#LSSSLFIILLSYLFIFAAIFR.I | 0.8499 |
| IPI00303587 | K.HPMAN#ITWMAN#HTGWSDFILLGLFR.Q | 0.5496 |
| IPI00303699 | K.KQPGQPRPTSKPPASGAAAN#VSTSGITPGQAAAIASTTIM*VPF.G | 0.5648 |
| IPI00303813 | K.CSEN#ATMTLPGIHPPTLNQIM*DWICLLLDAN#FTV.V | 0.6397 |
| IPI00303868 | R.LNYLLRVN#GSEQTVVAFFIM*PARTNNFN.V | 0.839 |
| IPI00303875 | -.M*N#NTAASPMSTAT.S | 0.9316 |
| IPI00303963 | K.LTDTICGVGN#M*SAN#ASDQER.T | 1 |
| IPI00303963 | K.QSVPAHFVALN#GSK.L | 0.9995 |
| IPI00303963 | R.LGSYPVGGN#VSFECEDGFILR.G | 0.9985 |
| IPI00303963 | K.TMFPN#LTDVR.E | 0.9745 |
| IPI00303963 | K.DHEN#GTGTNTYAALNSVYLMM*NNQM*R.L | 0.6754 |
| IPI00303980 | K.RFN#GSESIKSSWN#ISVVKFLLEK.L | 0.8393 |
| IPI00304023 | -.M*N#ISGSSCGSPNSADTSSDFK.D | 0.5777 |
| IPI00304023 | S.SNKQILINKN#ISESLGEQN#R.T | 0.6867 |
| IPI00304030 | R.VHLTPVEGVPDSDYIN#ASFINGYQEK.N | 0.9971 |
| IPI00304379 | R.NKESSDQTGIN#ISGFENK.I | 0.889 |
| IPI00304379 | K.CESDN#TTNGCGLESPGNTVTPVNVNEVK.P | 0.7172 |
| IPI00304452 | K.SSLSASTNPELGSN#VSGTQTYPVVTGR.D | 0.6096 |
| IPI00304481 | R.THGRN#GTENINHR.G | 0.8711 |
| IPI00304481 | R.RHN#SSDGFDSAIGRPNGGNFGRKEK.N | 0.6208 |
| IPI00304527 | K.EVNSCTTGSSN#STIIGSQGSETPK.E | 0.5151 |
| IPI00304587 | R.KLLFLSPDLELN#SSSSHNT.L | 0.6322 |
| IPI00304654 | R.N#STDENFHASLMSEISPISTSPEISEASLM*SNLP.L | 0.7347 |
| IPI00304661 | K.FHHLIPAHTFTN#ISTKNPQGSK.S | 0.5884 |
| IPI00304670 | R.TPM*N#SSWLPGSPMPQAQSPEEGQR.P | 0.7905 |
| IPI00304706 | H.RVLHNSLGN#ISM*LPCSSFTPNWPVQNPDSR.K | 0.5641 |
| IPI00304710 | K.IM*N#LTEFSM*VDGMWQAQGYPRNR.L | 0.8813 |
| IPI00304849 | R.RHKDM*DVDILALVN#DTVGTM*M*TC.A | 0.9665 |
| IPI00304895 | R.QLN#TSDENGKEELFSLK.D | 0.5674 |
| IPI00304911 | K.NFINQGPYEN#RSMFESLDLSWK.L | 0.7486 |
| IPI00304926 | K.HVTM*DQVGTFAGLLIGLAQLN#CSELKLK.R | 0.9847 |
| IPI00304972 | V.KEM*HTCTVEGCN#ATFPSR.R | 0.9354 |
| IPI00304992 | K.HSGGGGGGGGGGGADPAWTSALSGN#SS.G | 0.8687 |
| IPI00305022 | -.M*ILSN#TTAVTPFL.T | 0.6979 |
| IPI00305349 | P.SSLIQAN#VTVGTCSGFCSQKEFPLAILR.G | 0.6627 |
| IPI00305349 | R.SLVPTLREM*VAFLN#VSVSEER.L | 0.5169 |
| IPI00305374 | K.TGEDEDEEDNDALLKEN#ESPDVRR.D | 0.848 |
| IPI00305383 | K.TIAQGN#LSNTDVQAAKNK.L | 0.726 |
| IPI00305442 | M.LENPLN#STQWM*NDPETGPVMLQISR.I | 0.5715 |
| IPI00305457 | K.ADTHDEILEGLNFN#LTEIPEAQIHEGFQELLR.T | 1 |
| IPI00305457 | R.QLAHQSN#STNIFFSPVSIATAFAMLSLGTK.A | 1 |
| IPI00305457 | K.YLGN#ATAIFFLPDEGK.L | 1 |
| IPI00305461 | K.VVN#NSPQPQNVVFDVQIPK.G | 1 |
| IPI00305461 | K.GAFISN#FSMTVDGK.T | 1 |
| IPI00305461 | K.ENIQDN#ISLFSLGMGFDVDYDFLK.R | 0.8276 |
| IPI00305622 | R.VISAM*VNSLDDNGVLIGN#WSGDYSR.G | 0.5299 |
| IPI00305656 | K.LETKFKSGLN#GSILAER.E | 0.5948 |
| IPI00305698 | K.EKVEN#GSETGPLPPELQPLLEGEVK.G | 0.698 |
| IPI00305715 | K.VSGYLNLLANTIDN#FTHGLAVAASFLVSK.K | 0.5026 |
| IPI00305725 | R.AVNALPQN#MTSQMF.S | 0.6692 |
| IPI00305894 | R.TSRKSALRAGN#DSAM*ADGEGYR.N | 0.8772 |
| IPI00305901 | K.EEQHAN#TSANYDVELLHHK.D | 0.8009 |
| IPI00305945 | R.NWAHN#SSVEASSNLEAPGNER.K | 0.7208 |
| IPI00305945 | K.CPYSQEAMQRALIGRCQN#VSALPK.G | 0.8236 |
| IPI00306152 | M.EVNGQNFEN#ITFMK.A | 0.7124 |
| IPI00306196 | F.EN#KTNLKNQLILGVMGVDVSLEDIKR.L | 0.8677 |
| IPI00306196 | K.IDVNSWIEN#FTK.T | 1 |
| IPI00306196 | K.ISDN#NTEFLLNFNEFIDR.K | 0.8316 |
| IPI00306346 | R.LLAEGVCDN#DTVPSVSSINR.I | 0.5678 |
| IPI00306400 | R.ETQAIN#SSLSTLGLVIMALSNK.E | 0.7104 |
| IPI00306471 | K.EAN#PTPLTPGASSLSQLGAYLDSDDSN#GSN.- | 0.5005 |
| IPI00306599 | R.SCLSCPEN#TSTVKR.G | 0.8955 |
| IPI00306642 | K.AN#ASEKLGVLTSR.E | 0.7759 |
| IPI00306718 | R.IYIEDN#LSNSNEVEMEEK.G | 0.5926 |
| IPI00306718 | R.EGKELLLYFDASLEITN#VTQK.I | 0.7916 |
| IPI00306723 | R.NLN#DSSLFVSAEEFGHLLDENM*GSK.F | 0.6316 |
| IPI00306845 | K.WSM*VCLLMN#GSSHSPTAI.N | 0.925 |
| IPI00306851 | R.KVLIN#NSLDEPR.A | 0.827 |
| IPI00306869 | K.SLN#DSIQPDPLCLHN#SSLFALQNLQP.W | 0.9805 |
| IPI00306929 | M.SLDFN#ATGRITAAQLQTMLLEKSR.V | 0.8867 |
| IPI00306967 | R.YGEEYGN#LTRPDITFTYFQPK.P | 1 |
| IPI00306984 | R.IVDGIEDGN#SSEESQTFDFGSER.I | 0.764 |
| IPI00307017 | R.ELRSALLEFACTHNLGN#CSTTAMK.L | 0.5199 |
| IPI00307093 | K.IIYPKN#HSIEVQ.L | 0.9248 |
| IPI00307150 | K.AVTVMM*DPN#STQRYR.L | 0.665 |
| IPI00307317 | R.FGLLFNQEN#TTYSK.T | 0.7814 |
| IPI00307405 | R.RTSMHSSLN#TSPNQQPD.T | 0.5914 |
| IPI00307591 | R.GKRM*RPNSNTPVN#ETATASDSKGTS.N | 0.7204 |
| IPI00307591 | R.KNKPLSDMELN#SSSEDSK.G | 0.8995 |
| IPI00307592 | K.VSQQLGLDAPN#GSDSSPQAPPPR.R | 0.7343 |
| IPI00307611 | S.GNKVSITTTPFEN#TSIKTGPARR.N | 0.5148 |
| IPI00307611 | R.SFSCLN#RSLSSGESLPGSPTHSLSPR.S | 0.6572 |
| IPI00307649 | R.LHNGN#ASPPR.V | 0.7793 |
| IPI00307660 | R.CFLQLQPDN#STLTWVKPTTASPASSKAK.L | 0.6972 |
| IPI00307665 | T.AANN#LSVSNSASSLQK.D | 0.7301 |
| IPI00307713 | R.KPPLFNMNAM*SALYHIAQN#DSPTLQSNEWTDSFR.R | 0.6905 |
| IPI00307829 | R.AAGSAQGNNQACN#STSEVK.D | 0.7026 |
| IPI00328090 | M.TN#TSYSEPAQNSKLSLK.Q | 0.5474 |
| IPI00328094 | W.VSREPALLCTFPN#PSAPRK.D | 0.7148 |
| IPI00328115 | P.FLSDIHN#ISTLK.I | 0.7296 |
| IPI00328131 | R.STVGLSLISPNN#MSFATK.K | 0.578 |
| IPI00328142 | K.EALGSVVAHSTFSAMKANTMSN#YTLLPPSLLDHR.R | 0.5048 |
| IPI00328147 | K.RTIN#SSQEPAPGMKPNWPRSR.Y | 0.6458 |
| IPI00328183 | R.GSGAVAEGN#RTEAGSQDYSLLQAYYSQESK.V | 0.676 |
| IPI00328183 | K.N#ESSPAPPDSDADK.L | 0.6272 |
| IPI00328195 | R.YLLQNTALEVFMAN#R.T | 0.9065 |
| IPI00328195 | R.CYVNGQLVSYGDMAWHVNTN#DSYDK.C | 0.7676 |
| IPI00328195 | K.SM*IN#TTGAVDSGSSSSSSSSSFVNGATSK.N | 0.6068 |
| IPI00328207 | K.QN#NSYWR.E | 0.6204 |
| IPI00328226 | C.YEYFHQDDHNN#LTDK.H | 0.5659 |
| IPI00328267 | R.NRN#LSGGVLM*GFMLNR.I | 0.8592 |
| IPI00328309 | K.GLAQPPQAYFN#GSLPPQTVGHQAHGR.E | 0.5042 |
| IPI00328318 | K.DENSIN#GTPDITVEIR.E | 0.6536 |
| IPI00328355 | K.ENKGDNNCNHNDPLYEN#SS.- | 0.804 |
| IPI00328365 | A.SGPVILSELHPICN#KSILR.Q | 0.9445 |
| IPI00328434 | M.SLFLSN#LSTN#DSSLWK.E | 0.914 |
| IPI00328450 | R.FN#NSLLPTEPSQQLQAYVAWVNAQLKKR.P | 0.8225 |
| IPI00328460 | K.EYVKSEVIKLLPNAN#GSNVQLQLK.F | 0.7791 |
| IPI00328493 | K.GLEWIGYIYYSGSTNYN#PSLKSR.V | 0.6115 |
| IPI00328550 | K.YRCN#DTIPEDFQEFQTQNFDRFDN.- | 0.9769 |
| IPI00328555 | R.NLLETGLN#VSDTVTLPTAPNM*NSEPTLQPQTGEITNR.M | 0.6081 |
| IPI00328555 | M.DLTLN#SSTATPVSPGSVTK.E | 0.885 |
| IPI00328584 | R.ASAGLN#SSATSTAN#NSRCE.G | 0.7296 |
| IPI00328609 | R.SQILEGLGFN#LTELSESDVHR.G | 1 |
| IPI00328609 | K.DFYVDEN#TTVR.V | 1 |
| IPI00328609 | K.FLN#DTMAVYEAK.L | 0.9998 |
| IPI00328609 | D.GESCSN#SSHQQILETGEGSPSLK.I | 0.998 |
| IPI00328629 | K.KPKGINSN#STAN.L | 0.8143 |
| IPI00328658 | M.TN#YSFHCNVCHHSGNTYFLR.K | 0.9698 |
| IPI00328704 | K.EQYQVLIQAKDMGGQLGGLAGTTIVN#ITLTDVN.D | 0.5168 |
| IPI00328706 | R.N#SSLVLHHR.T | 0.7457 |
| IPI00328715 | K.SGKGDSTLQVSSGLNEN#LTVNGGGWNEK.S | 0.5142 |
| IPI00328736 | K.SNGLMFTNIMMQNTN#PSASPEYMFSSNIEPEPKD.L | 0.6152 |
| IPI00328746 | R.ARGN#SSSNHLYGVAEAGAPPADPSTLYR.D | 0.6646 |
| IPI00328752 | R.AWHN#LTVLATELDSSAQASR.V | 0.6333 |
| IPI00328762 | M.SGTLVMLLN#DSADLRDLATSMDSIVK.L | 0.61 |
| IPI00328762 | R.TNGDILVLYN#LSK.H | 0.8388 |
| IPI00328809 | K.VELPPPDLGPSSALN#QTLMLLR.E | 0.9487 |
| IPI00328911 | L.KDENTISPYEMCSSGLVQALLTVLNN#VSIFRATK.Q | 0.7087 |
| IPI00328911 | K.EAASQRPLSSSASNRLSVSSLLAAGAPM*SSSASVPN#LSSR.E | 0.5238 |
| IPI00328943 | K.AQNGIAIMVYTN#SSNTLYWELNQAVR.T | 0.9689 |
| IPI00328960 | K.TPASN#ISTQVSHTKLSVEAPDSK.F | 0.764 |
| IPI00329007 | K.GFN#WSSTLTKHR.R | 0.884 |
| IPI00329028 | D.AKAQLALSSSAN#QSK.E | 0.6857 |
| IPI00329038 | A.GLGNGVLPN#VSEETVSPTR.A | 0.7932 |
| IPI00329054 | R.LCQTCYPLFQQVVSKMDN#ISR.A | 0.974 |
| IPI00329070 | R.TESQLTPCIRN#VTSPTR.Q | 0.5361 |
| IPI00329083 | M.QTCGN#VSNQFQLGTCR.L | 0.797 |
| IPI00329130 | M.AN#VTWPQGPFTTWSTTGDAPV.I | 0.639 |
| IPI00329192 | R.HVN#LSSLVSCLCVNLCSPYLLLRR.A | 0.5882 |
| IPI00329205 | K.EPVGCVNN#ISFLASLAGSTSR.N | 0.8038 |
| IPI00329244 | K.DFAN#MTSLVDLTLSR.N | 0.6419 |
| IPI00329264 | K.VSIIPPIALN#STDSD.G | 0.5697 |
| IPI00329318 | S.GEKDESEVISQN#ETCSPAEVESNEK.D | 0.8434 |
| IPI00329345 | K.GGM*NGYHVNGAIN#DTESVDSLSEGLETLSIDAR.E | 0.8529 |
| IPI00329351 | K.NIGAKLVQDVAN#NTNEEAG.D | 0.8142 |
| IPI00329367 | R.LDLSGNALTEDM*AALMLQN#LSSLR.S | 0.8238 |
| IPI00329420 | R.SKDGPSYFTVSFN#RTFLMMITNK.A | 0.5126 |
| IPI00329472 | -.MDPN#CSCSTSSSCTCTTSSKSR.E | 0.682 |
| IPI00329488 | R.SN#STSSMSSGLPEQDRM*AM*TLPR.N | 0.9182 |
| IPI00329528 | R.RQAPIN#FTSRLNRR.A | 0.5127 |
| IPI00329536 | N.N#ESSSEGFICPQCMK.S | 0.6904 |
| IPI00329536 | K.ELVQVQTLMDN#MTLER.E | 0.854 |
| IPI00329577 | K.KVTCPPTVTVKDEQSGGGN#VSSTLLK.Q | 0.5474 |
| IPI00329600 | K.M*N#GTLTAVESFLTIHSGPEGLSIHDG.T | 0.9825 |
| IPI00329603 | K.M*EVGIEDCLHIEFEYN#KSK.Y | 0.5164 |
| IPI00329628 | R.LN#GSAAGHV.L | 0.5541 |
| IPI00329631 | K.GTN#VSAPDQLSLALAWNR.V | 0.8281 |
| IPI00329637 | R.QLVEM*EYTM*QQCN#ASVYM*EAKNR.G | 0.6213 |
| IPI00329638 | R.SRNKYGRGSISLN#SSPRGR.Y | 0.8113 |
| IPI00329662 | A.KENEN#SSPVAGAFGVFSTISTAVQSTGK.S | 0.5474 |
| IPI00329695 | K.ALDFSLDGNIN#LTELTLALEYELLVTK.N | 0.6113 |
| IPI00329708 | R.YDAQLILEN#NSGIPK.L | 0.5184 |
| IPI00329784 | D.M*VVM*LLSLLEGNVVN#GTIGK.Q | 0.7234 |
| IPI00329784 | D.LNKN#CTVTVTLGDERGR.V | 0.6606 |
| IPI00332067 | K.QM*LIVITDGESHDHDQLN#DTALELRNK.G | 0.7899 |
| IPI00332082 | K.HTGTIPGAQGLM*N#SSLLHQD.I | 0.8619 |
| IPI00332158 | K.GKNFNDN#HSFLTNDELAVLP.V | 0.6801 |
| IPI00332161 | R.EEQYN#STYR.V | 1 |
| IPI00332277 | K.EVN#SSLHLGHAGSSPHALA.S | 0.7475 |
| IPI00332318 | S.YFKCGEN#VSQK.N | 0.5774 |
| IPI00332333 | C.FEN#VTSIMFLVALSEYDRVLVESDNENRM*EESK.A | 0.5939 |
| IPI00332345 | R.DNAN#NSPYLQMNSLR.A | 0.9971 |
| IPI00332346 | -.N#ASLLIQN#VTQEDTGSYTLHIIKR.G | 0.6811 |
| IPI00332370 | K.AGM*NIARLN#FSHGSHEYHAESIANVREAVESF.A | 0.5309 |
| IPI00332380 | R.NGGTNEESN#SSGNTNTDPPAEDSQK.S | 0.5529 |
| IPI00332466 | L.CADDAKTHHWN#ITAVKLALVCSSEGSPGGTAR.G | 0.9991 |
| IPI00332512 | R.SSTSSIDSN#ISSK.S | 0.9998 |
| IPI00332512 | Q.HSLN#LTESTSLDM*LLDDTGECSAR.K | 0.9436 |
| IPI00332565 | -.MDPN#CSCAAGDSCTCAGSCKCKECK.C | 0.7704 |
| IPI00332722 | R.TPYRDMMLEN#YSLLLS.V | 0.6869 |
| IPI00332729 | R.WEYCN#LTR.C | 0.9997 |
| IPI00332845 | K.SSSGNENDEQDSDNAN#MSTQSPVSSEEYDR.T | 0.9962 |
| IPI00332864 | R.KM*SAPAQPPAEGTEGTAPGGGPPGPPPN#MTSNR.R | 0.7569 |
| IPI00332961 | K.SFSLN#RTLTVHQRIHTGEK.P | 0.8543 |
| IPI00333002 | R.HAQN#VTVDEVIG.A | 0.7239 |
| IPI00333041 | R.TGPNPGAGQN#PTRTGPNPGTGQN#PTRTGPNPGTGQN#PTR.T | 0.9711 |
| IPI00333112 | K.EAFAAALNAN#NSMSK.K | 0.6958 |
| IPI00333198 | N.M*IN#ATIKQDDPFNIDLGQQSQR.S | 0.5736 |
| IPI00333279 | K.DVISN#TSDVIGTCEAADVAQKVDEDSAEDTQSND.G | 0.937 |
| IPI00333289 | K.M*NELENKAEPGTHLCIDVEDAMN#ITR.K | 0.7228 |
| IPI00333310 | R.AWPKM*HTVNGYVN#RSLPGLIGCHR.K | 0.7641 |
| IPI00333334 | R.CITCAVVGNGGILN#NSHIGQEIDSH.D | 0.6226 |
| IPI00333382 | M.IYIPN#ATASLNLALSLLLFLEIYNER.V | 0.6007 |
| IPI00333575 | R.N#KSSMVVIDVKM*LSGFTPTM*SSIEELENKGQVMK.T | 0.8104 |
| IPI00333585 | R.RLCTNLVVNCWVLGFIWFLIPIVN#ISQ.M | 0.7531 |
| IPI00333592 | D.PFDN#SSRPSQVVAETR.K | 0.661 |
| IPI00333761 | -.M*AAFSVGTAMN#ASSYSAEMTEPKSV.C | 0.8233 |
| IPI00333770 | Q.VN#QSATALKHVFASLR.L | 0.5469 |
| IPI00333825 | L.EEDSVVHSVEN#DSQNMMESLSPKK.Y | 0.7121 |
| IPI00333858 | M.KGLTTTGN#SSLN#STSNTK.V | 0.6112 |
| IPI00333858 | A.ANN#CTVN#TSSVATSSM*K.G | 0.8885 |
| IPI00333870 | K.TWN#QSIALR.L | 0.9053 |
| IPI00333876 | K.DPKEKQIEPAMTSQNSKRN#T.S | 0.5583 |
| IPI00333913 | K.AVQEDEVGVPGSNSADLLRWTTATTMKVLSN#TTTT.T | 0.9611 |
| IPI00333982 | R.EEQYN#STFR.V | 0.9984 |
| IPI00333985 | N.GRENVGIYN#LSKGVNR.F | 0.8303 |
| IPI00333985 | R.VTNSNANAASPLIVAGYN#VSGSVRSDGEPM.K | 0.6708 |
| IPI00334012 | M.NTQAPPYSM*APAMVN#SSAASVGLADM*MSPGESK.L | 0.6306 |
| IPI00334015 | R.HLTSLNLVQNN#FSPK.G | 0.5146 |
| IPI00334125 | R.DLAELKSSLVN#ESEGAAGG.A | 0.7751 |
| IPI00334168 | R.GGLGGGYSGASGMGGITAVMVN#QS.L | 0.6832 |
| IPI00334245 | K.LVGFPAYGHSFLLSN#PSNHGIDAPTTGPGPAGPYTR.Q | 0.5359 |
| IPI00334271 | S.AN#TTIEDEDAKARK.Q | 0.5975 |
| IPI00334273 | R.RLTIEGVLDHPWLN#STEALDNVLPSAQLMMDK.A | 0.906 |
| IPI00334280 | R.RIWEETGN#YTFSS.D | 0.8961 |
| IPI00334281 | R.FCHEVKIN#YSPYVNYFTRVYWN#R.S | 0.6989 |
| IPI00334291 | K.VLFICTAN#VTDTIPEPLR.D | 0.9053 |
| IPI00334466 | K.GRN#TSSAVEMPFRNSKRSR.L | 0.8392 |
| IPI00334524 | R.LPNTYPN#SSSPGPGGLGGSVHYATMARSAVRPA.S | 0.5261 |
| IPI00334587 | N.QNGAEGDQIN#ASK.N | 0.9303 |
| IPI00334721 | R.TLIAPQGYPNPEN#FSWT.E | 0.5063 |
| IPI00334743 | R.SLAEANN#LSFPLEPLSR.E | 0.5787 |
| IPI00334813 | G.ECGKCFNN#NSN#LSKHK.K | 0.7625 |
| IPI00334829 | R.GNCDSSGM*NLNN#ISELIISN#RS.S | 0.9642 |
| IPI00334930 | R.SILELSPQPKNFN#RTATGWRLQ.- | 0.8543 |
| IPI00334985 | M.LRN#VTQMS.K | 0.9463 |
| IPI00334996 | K.M*SISPN#TTYPSLLEDGR.V | 0.9998 |
| IPI00335009 | R.LTCN#ATGAPSPTLMWLK.D | 0.7553 |
| IPI00335085 | R.KFLQEN#ASGR.G | 0.7603 |
| IPI00335108 | K.TKATQSQRRN#SSK.T | 0.9491 |
| IPI00335121 | K.RPNEN#SSADISGK.T | 0.5276 |
| IPI00335163 | K.NEIQSFLVSDPEN#TTWADIEAMVSVTL.- | 0.5605 |
| IPI00335210 | R.KYGSCSTILLDN#STASQPDLR.H | 0.97 |
| IPI00335216 | Y.N#FTYTGDGDITLITDNNGNMVNVRR.D | 0.6097 |
| IPI00335256 | K.NVIFSPLSISTALAFLSLGAHN#TTLTEILK.G | 1 |
| IPI00335256 | R.TLN#QSSDELQLSMGNAMFVK.E | 1 |
| IPI00335256 | K.FN#LTETSEAEIHQSFQHLLR.T | 1 |
| IPI00335256 | K.YTGN#ASALFILPDQDK.M | 1 |
| IPI00335256 | S.PLDEEN#LTQENQDR.G | 1 |
| IPI00335256 | K.LINDYVKN#GTR.G | 0.9998 |
| IPI00335356 | K.STGKPTLYN#VSLVMSDTAGTC.Y | 0.5542 |
| IPI00335426 | M.NTGMNAGM*NPGMLAAGNGQGIM*PNQVM*N#GSIGAGR.G | 0.799 |
| IPI00335543 | K.KENVAADIPITETEAYQLLKKATLQDNTN#QTEN.R | 0.9668 |
| IPI00335587 | K.SSLVN#ESETNQN#SSSDSEAERR.P | 0.7004 |
| IPI00335823 | K.IDRLDGTPQEPLCGFSKQMVEIVHKHN#ISLAVLM*S.L | 0.9407 |
| IPI00335859 | K.GKN#LSLSLDALFM*GK.S | 0.9266 |
| IPI00335933 | M.EN#YSSLVSLETHTGEK.L | 0.816 |
| IPI00336019 | K.ANQENQALSKKLN#DTHNELNDIKQK.V | 0.5412 |
| IPI00336075 | K.SSKDGNSVM*SPLFISTFTLN#ISHTASEGATGENLAK.V | 0.8814 |
| IPI00336156 | R.NDMTYNYANRQSTGSAPQGPAYHGVN#RTDEVLHTDQR.A | 0.557 |
| IPI00337426 | K.N#ISNPPDMSGWNPFGEDN#FSK.L | 0.8699 |
| IPI00337454 | K.KKKALSSM*GAN#YSSYLA.K | 0.5174 |
| IPI00337558 | K.GELN#TSIFSSR.P | 1 |
| IPI00337558 | K.LLHALGGDDFLGM*LN#R.T | 0.9978 |
| IPI00337662 | R.LAENSGN#ASTER.N | 0.5455 |
| IPI00337691 | M.KFRGNGALSN#ISDLPFLAENSAFPK.M | 0.6824 |
| IPI00337766 | K.RADKYWEYTFKVN#WSDLSVTTVTK.T | 0.7534 |
| IPI00339361 | R.GHKISDYFEYQGGN#GSSPVR.G | 0.6822 |
| IPI00339366 | K.VGMHCSGPLGGLLQLAAEVN#VTSR.V | 0.8747 |
| IPI00339381 | K.KEYNVNDDSMKLGGN#NTSEK.A | 0.8946 |
| IPI00339381 | K.AGGVGLN#LSAASRVFLM*DPAWNPAAEDQ.C | 0.6808 |
| IPI00373782 | R.YDFDLFAN#ESVPDHVGYAK.V | 0.9424 |
| IPI00373787 | R.DDFRQN#PSDVM*VAVGEPAVM*ECQPPR.G | 0.5036 |
| IPI00373797 | R.KKKIN#GSSPDTATSGGYHSPGDSAT.G | 0.9247 |
| IPI00373855 | R.YSWQCVN#QSVLCGPSGN#HTDIETK.Q | 0.6195 |
| IPI00373875 | M.TIWILKVMN#FTIDGMGNLRITEK.G | 0.6142 |
| IPI00373895 | K.EWFNTDSM*TLN#NTAY.L | 0.6588 |
| IPI00373923 | M.FPVLFPFN#PSSLTM*DSIHIPACLNLEFLNEV.- | 0.5603 |
| IPI00373928 | L.ALAN#SSQANDCLDSFASPN#K.T | 0.8228 |
| IPI00373928 | T.LM*AAFQGPGEDFIGGSIFVN#VTM*FSSGGEMVQAETSGVK.I | 0.9188 |
| IPI00373943 | K.NM*AQETN#QTPGPMLCSTGCGFYG.N | 0.915 |
| IPI00373947 | R.CCYSLGN#GSSGFRFLKYGGCGFPSLSYGSR.F | 0.5023 |
| IPI00373966 | K.NGQDHLN#ISSMTAAQEGTYT.C | 0.7317 |
| IPI00374007 | K.TTEFDTN#STDIALK.V | 0.9573 |
| IPI00374029 | R.SPSPSKN#DSFFTPDSNHNSLSQSTTGHLSLPQK.Q | 0.6176 |
| IPI00374033 | K.ALTN#GSFSPSGNN#GSVNWR.T | 0.8303 |
| IPI00374046 | K.GLRGPGSIGSEPDFWN#GSGSSRVK.G | 0.588 |
| IPI00374078 | K.LEEYKEAFAVALKAN#NSM*SK.K | 0.646 |
| IPI00374080 | K.HTGPGILSMANAGPNTN#G.S | 0.9915 |
| IPI00374113 | K.HTGPGILSMANAGPNMN#GSQFFICTAK.T | 0.9857 |
| IPI00374128 | K.RSHN#ASIIDMGE.E | 0.565 |
| IPI00374136 | L.QLAN#HSGYIK.V | 0.5262 |
| IPI00374154 | R.N#YSSIHSQSRST.S | 0.5242 |
| IPI00374218 | K.ADETVTEMN#FSNEYN#KSELMLQENQMIADGK.E | 0.9694 |
| IPI00374218 | R.RGSEVISN#TTEDTQLTSETQSLTGNK.K | 0.8453 |
| IPI00374218 | R.EAYSPLELLDN#LSGADVR.Q | 0.7892 |
| IPI00374218 | K.ITKN#FSEVGFPDILK.A | 0.5008 |
| IPI00374219 | K.QIKN#SSLLSFDNEDENE.- | 0.6397 |
| IPI00374227 | R.FARHPFYGSAGVNSGVM*LMN#LTR.I | 0.5068 |
| IPI00374341 | M.STISCHQDVILSMSFNTN#GSLLATTCKDR.K | 0.8314 |
| IPI00374355 | K.SPPRKIN#SSPNVN#TTASGVEDLNIIQVTIPDDDNERL.S | 0.7092 |
| IPI00374359 | I.FKN#ATFTFTWAFQR.T | 0.6616 |
| IPI00374378 | K.NSLSGIAMNVPASRGSNLN#SSGAN#RTSLSGGTGSGTQGATK.P | 0.6461 |
| IPI00374389 | K.SSSSLGN#ATSDEDPNTNIM*NINENK.N | 0.6864 |
| IPI00374435 | R.QHNVIN#LSSLDAM*M*.D | 0.6392 |
| IPI00374461 | M.GYLCTHQLLFLQLN#QSSFNSK.N | 0.8437 |
| IPI00374532 | K.FSPSDTDEN#ATNTQSTT.- | 0.9426 |
| IPI00374572 | T.TAQLSWRPGPDN#HSPITMYVIQAR.T | 0.5576 |
| IPI00374646 | R.SRDFSAAPQN#TTQNFLVNGRIR.K | 0.896 |
| IPI00374681 | K.N#MSVTFALDEPMKEGECSR.R | 0.7049 |
| IPI00374711 | R.NSRMN#FTYQIADCNR.D | 0.7444 |
| IPI00374729 | R.MDVSSN#SSPSCQASPSQEDVSADMQERR.G | 0.6969 |
| IPI00374741 | K.N#LSEM*QDLEEIRKITGVCPQFNVQF.D | 0.9168 |
| IPI00374749 | K.VDM*HDDSLN#TTANLIWNK.L | 0.6647 |
| IPI00374755 | R.VRRASCEPAN#GSGR.S | 0.9067 |
| IPI00374756 | K.ILHN#VSEDPSFVISQHIR.K | 0.6567 |
| IPI00374770 | K.DYN#ASASTISPPSSM*EEDK.F | 0.6448 |
| IPI00374793 | R.ELAGN#TSSPPLSPGR.P | 0.6648 |
| IPI00374836 | K.VN#PTLVIQPTN#LSARLETDVECLK.L | 0.7367 |
| IPI00374844 | M.TN#ASNSQQSISMQQFSQTSN#PSAHFHK.C | 0.9382 |
| IPI00374967 | K.AIESGTEWN#LSLLK.L | 0.6066 |
| IPI00374984 | V.FDASAPAHCGVRVGLSAQPCPN#KSSK.A | 0.6035 |
| IPI00375011 | K.LKM*LTN#PSTANSNLLLHQ.S | 0.6447 |
| IPI00375121 | K.AAIQGNGDVGAAAATAHNGFSCSN#CSMLSER.K | 0.7765 |
| IPI00375139 | R.VEGLFLTLSGSN#LTVK.V | 0.5812 |
| IPI00375143 | R.FAVQLYNTNQN#TTE.K | 0.9519 |
| IPI00375144 | N.IAPN#ISRAEIISLCK.R | 0.8502 |
| IPI00375152 | K.ISNN#ITLR.E | 0.6838 |
| IPI00375174 | K.KSNQLEN#HTIVGTR.S | 0.6108 |
| IPI00375179 | R.RFGILSNCN#HTYCLKCIRK.W | 0.8106 |
| IPI00375210 | V.YIVQSGCGEIN#DSLMELLIMINACK.I | 0.6179 |
| IPI00375216 | K.VARLEQN#GSPMGARGRPNGAVAK.A | 0.8406 |
| IPI00375220 | R.M*ENANLPTKQEPSWIN#QSEQGIK.E | 0.5284 |
| IPI00375253 | K.N#VTESPSFSAGDNPPVLFSSDFRI.S | 0.676 |
| IPI00375266 | K.TGHRMERPDN#CSEEM*YR.L | 0.5967 |
| IPI00375294 | R.NRKQGVLAVIDAYN#TSNKET.K | 0.9321 |
| IPI00375294 | R.TIN#VSNLYVGGIPEGEGTSLLTMRR.S | 0.763 |
| IPI00375294 | R.QTN#ESLLILRAIPEGIRDK.G | 0.5806 |
| IPI00375442 | K.VDSEENTLNSQTN#ATSGMNPDGVLSK.M | 0.8037 |
| IPI00375455 | R.GCNVN#STSSAGNTALHVAVMRNR.F | 0.9969 |
| IPI00375473 | K.ECCNAFN#QSSALTNHK.R | 0.7395 |
| IPI00375498 | K.FEEN#TSNSQWHVSLSVSFK.K | 0.546 |
| IPI00375506 | R.GLN#VTLSSTGR.N | 1 |
| IPI00375506 | R.FSDGLESN#SSTQFEVK.K | 1 |
| IPI00375506 | K.N#TTCQDLQIEVTVK.G | 0.9998 |
| IPI00375506 | K.N#LTVSVHVSPVEGLCLAGGGGLAQQVLVPAGSAR.P | 0.8835 |
| IPI00375507 | K.LPCSENPRDTEDVPWITLN#SSIQK.V | 0.9122 |
| IPI00375559 | R.NEMLEIQVFN#YSKVFSNK.L | 0.9579 |
| IPI00375628 | R.SSDMDQQEDMISGVENSN#VSENDIPFNVQYPGQTSK.T | 0.7843 |
| IPI00375662 | D.EPTVVPTTSARMESQATSASIN#NSN#PST.S | 0.6812 |
| IPI00375674 | K.LQLWTN#GSVAYSVAR.E | 0.9176 |
| IPI00375747 | Q.NSELQAKTN#ETEK.A | 0.5652 |
| IPI00375757 | R.DGKN#ATTDALTSVLTK.I | 0.8482 |
| IPI00375757 | K.DEHAQSNEIVVN#DSGSDNVK.K | 0.6865 |
| IPI00375772 | K.HTGPGILSMANAGPITN#SSQFFICTAK.T | 0.7151 |
| IPI00375814 | A.GQVLENLPPIGVFWDIEN#CSVPSGR.S | 0.7383 |
| IPI00375823 | V.IHN#ASIMNAEAAGGYR.Y | 0.8084 |
| IPI00375835 | M.ILLN#NSQKLLVLYKPLAWSIPESLK.V | 0.88 |
| IPI00375881 | K.VPPTVCPFHSLNN#VTKAGEGSWLESK.R | 0.8137 |
| IPI00375881 | K.ASGQVIDEIAGN#FSR.A | 0.7828 |
| IPI00375936 | K.GLVEGVYCN#LTEAFEIPACK.Y | 0.9419 |
| IPI00375947 | K.QM*ESSEGSSN#TTEATSGSGVR.G | 0.7925 |
| IPI00375951 | R.STN#HSTQSALN#QSLHTVGAQPITAHSR.R | 0.7436 |
| IPI00375986 | R.RRN#ITVGLAVFATGR.F | 0.8536 |
| IPI00376019 | R.VGECSCQVSLMLQN#SSAR.A | 0.9243 |
| IPI00376094 | K.IN#SSSVCVSSISENDNGISFTCRLGR.D | 0.579 |
| IPI00376147 | R.GEN#VSTTEVEGVLSRLLGQTDVAVYGVAVPGK.L | 0.9584 |
| IPI00376190 | K.KVIFSEEITN#LSQMTLNVQGPSCILK.K | 0.575 |
| IPI00376192 | K.LN#TTISTTSKGTLLPNSIM*TSTLKDQGGISR.T | 0.6101 |
| IPI00376199 | P.PTLVPLMN#GSATPLPTALGLGGR.A | 0.6961 |
| IPI00376202 | R.FFVELVGHYSLN#M*TVT.E | 0.6697 |
| IPI00376235 | M.N#ATNHAILQSLVHLM*KPNAVPKACCAPTK.L | 0.5799 |
| IPI00376252 | R.FHFQGPCGRMLPEPLAGHEN#ETVS.- | 0.755 |
| IPI00376258 | R.LYM*LSFLPFLVLLVLIRNLRILTIFSM*LAN#ISM L.V | 0.7917 |
| IPI00376259 | R.RRRPGHGSLTN#ISR.H | 0.9843 |
| IPI00376288 | G.VN#ATATADR.L | 0.8447 |
| IPI00376298 | R.TTASTNM*N#ASSSR.S | 0.9793 |
| IPI00376301 | R.SLSWTM*GMEGLLQN#STNFV.L | 0.9409 |
| IPI00376327 | R.LKYQAQN#ITSGDTTTILPAACCTMK.S | 0.5563 |
| IPI00376383 | K.LDKLLKLRELN#LSYNK.I | 0.6894 |
| IPI00376436 | K.NEN#ETILNPEEVALLEEYIPTR.H | 0.7623 |
| IPI00376539 | K.YTGSGILSMANAVLNTN#GSHFFICTAK.T | 0.5376 |
| IPI00376550 | R.RPAAVGAGLQNMGNTCYVN#ASLQC.L | 0.6503 |
| IPI00376566 | R.QVYN#ATIAEHAPVG.H | 0.5385 |
| IPI00376572 | K.N#PTDACLDAVM*NEAPGPIN#FTMLLAM*FGKK.L | 0.6754 |
| IPI00376639 | P.FRMVN#ETHLDEIFASNTFAPILLTKGLLAK.K | 0.6338 |
| IPI00376647 | -.M*VN#HTM*FFDVAVDSEPLDHVSFELFAEK.F | 0.5373 |
| IPI00376672 | K.AREDIFMETLNNIM*EYYN#DSNGQ.- | 0.8235 |
| IPI00376675 | -.M*DSSCHN#ATTKM*LATAPARGNM*MSTSK.P | 0.8437 |
| IPI00376706 | P.EVLSPLTLVN#TSGEAQGTVDR.V | 0.9205 |
| IPI00376711 | R.RPAAVGAGLQNMGNTCYEN#ASLQCL.T | 0.7832 |
| IPI00376742 | K.AQLIGPLVFGGMN#LTRDELGWK.L | 0.6307 |
| IPI00376747 | K.HMGSASEDSMGPPRVGRVLPTTN#GTFPVCIWR.G | 0.6576 |
| IPI00376770 | K.KNTFN#FTLISWHSGLK.D | 0.5759 |
| IPI00376784 | R.IAIHALATNM*GAGTEGAN#ASYILIR.D | 1 |
| IPI00376784 | R.YGEEYGN#LTRPDITFTYFQPK.P | 1 |
| IPI00376817 | K.FLVHDINELEVLMMCN#KSYCAKIAHN#VSSK.N | 0.8307 |
| IPI00376829 | R.TEGNIFDSLIGGN#ASAEGPEGK.G | 0.831 |
| IPI00376832 | V.LEM*EEAGSIFACNM*EGRSN#SSGEVK.Y | 0.6631 |
| IPI00376877 | R.WN#TTYRR.Y | 0.8726 |
| IPI00376890 | M.RDSEATGSASSAQDSTSEN#SSSVGGR.C | 0.7392 |
| IPI00376964 | R.VAVVQHAPSESVDN#ASM*PPVK.V | 0.9999 |
| IPI00377042 | R.KQPMTLTVTSFN#ASTGRVN#ATLSNSNMELLLSGVY.K | 0.7414 |
| IPI00377042 | R.CEALCGGN#ITAM*N#GTIY.S | 0.5896 |
| IPI00377076 | K.FVSDATDYAAGFN#LTYK.A | 0.956 |
| IPI00377111 | P.TFSLPLQLPPPVN#TSK.L | 0.7058 |
| IPI00377116 | K.AFRN#HSFLLIHQ.R | 0.8205 |
| IPI00377188 | K.GEERSSCISGNN#FSWSLQWNGK.E | 0.6599 |
| IPI00377202 | M.DSSLVSQQPPDNQEKERLN#TSIPQKR.K | 0.9893 |
| IPI00382394 | R.RTPEEAAAGEVN#LS.S | 0.7237 |
| IPI00382397 | R.SPCSIN#ASISSITSYTCF.- | 0.6137 |
| IPI00382411 | L.FNSNNFDLGCKQN#GTK.L | 0.6054 |
| IPI00382432 | K.LNNPKDFQELNKQTKKN#M*TIDGK.E | 0.991 |
| IPI00382485 | M.LN#LSSYPIWVSLFRGSPR.R | 0.7819 |
| IPI00382512 | M.PQPGCNLLN#GTQEIGPVGMTENCNRK.D | 0.6219 |
| IPI00382532 | R.SRHEN#TSQVPLQESRTRKR.R | 0.7304 |
| IPI00382556 | R.KN#YTSTELTVEPEEPSDSSGIN#LSGFGR.N | 0.5475 |
| IPI00382595 | C.TADNSYGPVQSM*VLN#VTVR.E | 0.5487 |
| IPI00382618 | Q.PANSNN#GTSTATSTNNNAK.R | 0.5111 |
| IPI00382623 | S.AYDSNDPDVESN#SSSGISSPSR.Q | 0.8752 |
| IPI00382628 | I.FPLLYVELN#DSAK.Q | 0.6415 |
| IPI00382629 | K.YKDQWGQQGLYHCPN#FSDVMGN#K.T | 0.657 |
| IPI00382631 | K.VYEN#TTLGFIVEVEGLPVPG.V | 0.5381 |
| IPI00382631 | K.EKIPSPETLQPDTHN#ISK.S | 0.8112 |
| IPI00382631 | K.CVAEN#NSGAVESVSDLWEPVTYR.E | 0.6931 |
| IPI00382681 | K.YCGLGLQIN#HSIESKG.N | 0.6898 |
| IPI00382705 | L.QGLPGSSGN#M*T.N | 1 |
| IPI00382717 | R.LAFATMFN#SSEQSQK.G | 0.5353 |
| IPI00382750 | K.YEFCPFHN#VTQHEQTFR.W | 1 |
| IPI00382792 | K.VSLGAVYFFMN#GTYGLAFWYGTSLILNGEPGYTIGTVLAVKR.K | 0.5824 |
| IPI00382818 | K.HVEVN#GSKTAGAN#TTDK.E | 0.7617 |
| IPI00382824 | E.QLN#QTLAEM*KAQEVAELKRK.K | 0.6018 |
| IPI00382843 | P.MDEYSNQNNFVHDCVN#ITIK.Q | 0.5824 |
| IPI00382870 | R.TITN#VSDEVSSEEGPETGYSLRR.H | 0.8717 |
| IPI00382926 | S.AAQNPM*M*TN#ASATQATLTAQR.F | 0.7783 |
| IPI00382937 | R.IYTSGSTNYN#PSLK.S | 0.9376 |
| IPI00382937 | R.GLTFQQN#ASSMCGPDQDTAIR.V | 0.9865 |
| IPI00382990 | K.NLNLELNPN#QSVK.V | 0.7498 |
| IPI00382995 | M.IPCVLQYLN#FSTIIGVGVGAGAYILAR.Y | 0.7145 |
| IPI00383015 | T.TTATFTTN#TTTTITSGFTVNQNQLLSR.G | 0.5639 |
| IPI00383032 | K.GDVSLTIEN#VTLADSGIYCCR.I | 0.8603 |
| IPI00383040 | E.GEKDPWGVSMM*N#TSFAGGQIHQDI.- | 0.6457 |
| IPI00383078 | R.SAPVPVTTQNPPGAPPN#VSGRR.H | 0.9704 |
| IPI00383119 | M.IFEN#PSLCASNSEPLK.L | 0.5794 |
| IPI00383151 | F.TVFTN#NT.H | 0.7675 |
| IPI00383197 | R.SSN#LTTHKIIHTGEK.P | 0.7828 |
| IPI00383221 | R.LGPVSTAN#MSR.P | 0.7114 |
| IPI00383222 | K.QN#TTLGLSER.P | 0.99 |
| IPI00383233 | R.YDLTGWLHRAKPN#LSALDAPQVLHQSK.R | 0.9657 |
| IPI00383317 | K.SPLFMGKVVN#PTQK.- | 1 |
| IPI00383323 | R.NGYGFINRN#DTKEDVFVHQTAIK.K | 0.6899 |
| IPI00383351 | -.M*SRINKYLFSNSDSN#FSHFSVSN#V.S | 0.7104 |
| IPI00383371 | E.ILGFNSKGEVHGIN#GTQWGQTLR.M | 0.9636 |
| IPI00383425 | K.VFISN#STN#SSNPCERR.S | 0.8844 |
| IPI00383454 | R.SN#LTSFGADQVM*DLGR.D | 0.6593 |
| IPI00383455 | R.ETALCSLN#SSHGIVAFPSRSR.S | 0.8133 |
| IPI00383469 | R.FDGILADAGQTVEN#MSWMLVCDR.P | 0.7854 |
| IPI00383482 | R.EN#M*SDGDTSATESGDEVP.V | 0.7247 |
| IPI00383482 | K.EMN#KSDLNTNNLLFKPPVESHIQKNK.K | 0.8527 |
| IPI00383505 | R.LLSNPLLQTYLPN#STK.K | 0.5013 |
| IPI00383541 | R.YSGVN#MTGF.R | 0.5346 |
| IPI00383543 | R.KN#STFPQVQM*.R | 0.7637 |
| IPI00383580 | M.SSDN#DSYHSDEFLTNSK.S | 0.5329 |
| IPI00383585 | S.PKVTKQNSLNDEGCQSDLEDN#VSQGSSDALLLR.G | 0.5234 |
| IPI00383614 | K.LN#NTMNACAAIAALERVK.I | 0.5876 |
| IPI00383750 | R.QDN#GTLLSLEDLNGGILVDVNTAEHST.V | 0.7695 |
| IPI00383786 | K.ESLIM*NHVLN#TSQLASSYQYKKK.Y | 0.7004 |
| IPI00383786 | R.VKRNQEN#FSSVLYK.E | 0.8509 |
| IPI00383786 | K.GRGLNAM*AN#ETPDFMR.A | 0.5193 |
| IPI00383794 | V.GKM*QSTQTTN#TSN#STN#K.S | 0.5906 |
| IPI00383828 | R.ELGGAIDFGAAYVLEQASSHIGN#STQATVR.D | 0.5605 |
| IPI00383888 | M.TATHHFSVDLN#ASRSLSQVAM*DLHEAVSM*KLHRVR.E | 0.5144 |
| IPI00383931 | Q.TVQRSM*AN#LSVLFGQVVR.G | 0.9317 |
| IPI00383973 | R.VLYM*FNQMPLN#LTNAVATAR.Q | 0.507 |
| IPI00383973 | M.IHN#CSLIASALTISNIQAGSTGNWGCHVQTK.R | 0.595 |
| IPI00384004 | K.AQAEAN#ATAISNLLPFM*EYEVHTQLMNK.L | 0.5412 |
| IPI00384031 | -.M*PSSTLPGWPGSSGGPVSRPSSLESSRN#TSSN#SSPLNLK.G | 0.982 |
| IPI00384063 | R.YLFPEVDMTSTN#FTGL.S | 0.9761 |
| IPI00384138 | K.TLTFLAVMLIVLN#STGPAHQPGR.G | 0.7809 |
| IPI00384159 | M.KPVN#QTAASNKGLR.G | 0.7011 |
| IPI00384159 | R.QLEDPN#GSFSNAEMSELSVAQKPEK.L | 0.7079 |
| IPI00384193 | K.DIKKKNINLQPMWQLLPVEQDTSN#VTEM*K.V | 0.5349 |
| IPI00384202 | K.N#SSNWKLFK.E | 0.8565 |
| IPI00384210 | K.KEDYN#ETAPMLEQV.- | 0.5565 |
| IPI00384238 | R.N#SSLLEPQKSGNN#E.T | 0.9755 |
| IPI00384277 | K.EIAFLSEKISN#LTIVQAEIK.D | 0.9181 |
| IPI00384277 | K.TWSNRITEKQDILN#NSLTTLSQDITK.V | 0.6615 |
| IPI00384280 | K.M*SN#ITFLNFDPPIEEFHQYYQHIVTTLVK.G | 0.9985 |
| IPI00384367 | K.LGVSSVPSCYLIYPN#GSHGLINVVKPLR.A | 0.82 |
| IPI00384413 | R.AVQPHNGCFN#WTSR.A | 0.947 |
| IPI00384416 | K.KINLNHLLN#FTFEPR.G | 0.6975 |
| IPI00384441 | R.GKMADSSGRGAGKPATGPTN#SSSAK.K | 0.5636 |
| IPI00384450 | V.TAGILEM*RNALGN#QSTPAPPTGEVADTPLEPGK.V | 0.6518 |
| IPI00384456 | K.GTQTYSVLEGDPSEN#YSKYLLSLK.E | 0.5345 |
| IPI00384470 | R.N#FSSVAASSGN#TTL.N | 0.5266 |
| IPI00384496 | G.CGGGGSYSASSSSAALPVN#KSK.M | 0.8121 |
| IPI00384508 | K.MAAAN#LTFSQEVVWQR.G | 0.838 |
| IPI00384532 | V.HEEFNPNQAN#GSYASR.R | 0.5909 |
| IPI00384543 | K.NTNQGFSSAN#VSEEEER.K | 0.5445 |
| IPI00384556 | R.ELSEMRAPPAATN#SSK.K | 0.5522 |
| IPI00384651 | R.LYQQFNEN#NSIGETQARKLSK.L | 0.69 |
| IPI00384717 | K.LLQAENCDIFQN#LSAKQR.L | 0.6254 |
| IPI00384772 | R.N#LTGVM*NVAR.P | 0.6516 |
| IPI00384785 | M.FKM*AKN#WSAAGNAFCQAAKLHM*QLQSK.H | 0.8306 |
| IPI00384840 | L.SMLN#GTKVLS.D | 0.7724 |
| IPI00384877 | K.HKGLIEIPSLSEENEIN#DTEVN#VSK.K | 0.5927 |
| IPI00384969 | K.SSISNNYLN#LTFPRKR.T | 0.7225 |
| IPI00384984 | K.TDNSLLDQALQN#DTVFLNM*R.G | 1 |
| IPI00384984 | K.TVVTYHIPQN#SSLENVDSR.Y | 1 |
| IPI00385095 | R.FEKTNEM*LLNFNN#LSSARLQQMSER.F | 0.6078 |
| IPI00385247 | K.N#NTIAPKK.A | 0.5642 |
| IPI00385263 | R.DSFKVYCN#FTAGGSTCVFPDK.K | 0.7212 |
| IPI00385264 | K.THTN#ISESHPN#ATFSAVGEASICEDDWDSGER.F | 1 |
| IPI00385264 | K.STGKPTLYN#VSLVMSDTAGTCY.- | 1 |
| IPI00385264 | R.GLTFQQN#ASSMCGPDQDTAIR.V | 0.9865 |
| IPI00385267 | R.GGN#NSFTHEALTLK.Y | 0.6823 |
| IPI00385280 | M.PSN#SSASISKLR.E | 0.6522 |
| IPI00385287 | R.N#LSSLQPPPPGFK.R | 0.9481 |
| IPI00385291 | K.QEM*GGIVTEPIRDYN#SSR.E | 0.6259 |
| IPI00385317 | K.GSTPRNDPSVSVDYN#TTEPAVR.W | 0.8716 |
| IPI00385321 | R.ISLSDMPRSPMSTN#SSVHTGSDVEQDAEK.K | 0.8106 |
| IPI00385334 | Q.SLEDILHQVEN#K.T | 0.9617 |
| IPI00385341 | R.MLRFIQEVN#TTTR.S | 0.5871 |
| IPI00385343 | R.EHEKLLMEVCRN#CSA.V | 0.7115 |
| IPI00385358 | R.GNYGGGGNYNDFGN#YSGQQQSNYG.- | 0.8778 |
| IPI00385362 | R.VFFAGFSN#ATVDNSILLR.L | 0.5241 |
| IPI00385404 | K.KAVSPLLLTTTN#SSEGLSMGNYMGLINRIAQKKR.L | 0.9145 |
| IPI00385446 | K.TFAN#SSYLAQHIR.I | 0.5827 |
| IPI00385511 | L.KGGNN#DSWMNPLAKQFSNMGLLSQTEDN#PSSK.M | 0.61 |
| IPI00385511 | R.KGALETDNSN#SSAQVSTVGQTSR.E | 0.9344 |
| IPI00385511 | K.M*WKNHISSRN#TTPLPRPPPGLTN.P | 0.7333 |
| IPI00385539 | R.NLN#HTKQRLLEVANYVDQVVNSAGDAHG.- | 0.6411 |
| IPI00385684 | R.GERHGDIFMN#RTENWIGSQYKK.V | 0.8302 |
| IPI00385729 | K.N#DSDLFGLGLEEAGPK.E | 0.7373 |
| IPI00385743 | S.LRENSISPEGAQAIAHALCAN#STLK.N | 0.879 |
| IPI00385756 | P.NHRPTGRGNN#ISSHH.- | 0.8353 |
| IPI00385894 | K.NYNTN#ITTETSK.I | 0.764 |
| IPI00385962 | R.DIETFYN#TSIEEM*PPM*LL.- | 0.8287 |
| IPI00385973 | I.ITEGN#GTESLNSVITSMKTGELEK.E | 0.7951 |
| IPI00385980 | K.KNKN#SSKPQKNN#GSTWANVPLPPPP.V | 0.8485 |
| IPI00385980 | E.YKIWCLGN#ETR.F | 0.6971 |
| IPI00385980 | K.TVRTTEEAPSAPPQSVTVLTVGSYN#STS.I | 0.561 |
| IPI00386028 | R.KLGYSSLILDSTGSTLFAN#CTDDNIYMFN#MT.G | 0.6334 |
| IPI00386099 | K.VNAPILTN#TTLNVIR.L | 0.5699 |
| IPI00386134 | Y.CGTWN#NSLSGWVFGGGTK.L | 0.7368 |
| IPI00386139 | M.VYN#CTTGSTNPFHWGEVGMILPVFLNVR.I | 0.5525 |
| IPI00386145 | R.GAAAAPGN#WSSRQRPAHPR.T | 0.7285 |
| IPI00386225 | R.KALPMEFEAYIN#ASGEHGIVVFSLGSM*VS.E | 0.8915 |
| IPI00386236 | K.N#NSDISSTR.G | 1 |
| IPI00386236 | R.GLTFQQN#ASSMCVPDQDTAIR.V | 1 |
| IPI00386236 | K.THTN#ISESHPN#ATFSAVGEASICEDDWNSGER.F | 1 |
| IPI00386257 | R.IYPGPTRLAN#STIKDESPPR.Y | 0.5319 |
| IPI00386279 | F.NQIM*HAFSVAPFDQN#LSIDGK.I | 0.6244 |
| IPI00386327 | K.GETWATPN#CSEATCEGNNVISLS.P | 0.7424 |
| IPI00386389 | -.MRQNNN#ITEFVLLGFSQDLDVQK.A | 0.5718 |
| IPI00386421 | G.NIIN#M*SSVASSVKGGSVSFRGLR.C | 0.7712 |
| IPI00386442 | K.ADILLDCLLDEDPEN#QTLRKDYEK.T | 0.9765 |
| IPI00386532 | K.GPIGPGEPLELLCN#VSGALPPAGR.H | 0.7379 |
| IPI00386553 | M.WSHM*QPHLFHN#QSVLAEQMALNKK.F | 0.784 |
| IPI00386566 | K.EN#QSIRAFNSEHK.I | 0.6513 |
| IPI00386567 | R.EWN#GTYHCIFR.Y | 0.6039 |
| IPI00386567 | M.KVMCDNNPVSLNCCSQGNVN#WSK.V | 0.9231 |
| IPI00386567 | K.VLQQQWTN#QSSQLLHSVER.F | 0.8635 |
| IPI00386731 | K.NLPFLEHLELIGSN#FSSAMPR.N | 0.8123 |
| IPI00386732 | M.SHFPDRGSEN#GTPMDVKAGVR.V | 0.7764 |
| IPI00386764 | R.TAADN#FSTQYVLDGSGHILSQKPSHLGQGKK.V | 0.8748 |
| IPI00386928 | K.WQSAIQDFRSN#ATALCHIR.N | 0.9172 |
| IPI00386953 | R.RAFM*LEPEGMSPM*EPAGVSPMPGTQN#DTGRT.E | 0.9674 |
| IPI00387050 | R.RARHDSPDPSPPRRPQHN#SSGDCQK.A | 0.6349 |
| IPI00394642 | T.VTPVSPSFAHNPKRHNSASVEN#VSLRK.S | 0.9196 |
| IPI00394646 | R.RRKN#M*SEFLGEASIPGQEPP.T | 0.6674 |
| IPI00394652 | M.EITWTPMN#ATSAFGPNLR.Y | 0.8107 |
| IPI00394718 | K.RQPATLTVDWFN#ATSSKVN#ATFSEASPVELK.L | 0.8689 |
| IPI00394738 | K.SN#ISPNFNFM*GQLLDFER.T | 0.8923 |
| IPI00394801 | M.ENPQEPDAPIVTFFPLIN#DTFR.K | 0.8947 |
| IPI00394816 | K.N#LSGPDDLLIDK.N | 0.9721 |
| IPI00394823 | K.PLGPLQTLM*EN#LSSNR.F | 0.5646 |
| IPI00394824 | K.CQAHSQN#VTFVLRK.V | 0.6463 |
| IPI00394845 | K.N#LSINNDLNLR.Y | 0.8772 |
| IPI00394866 | R.SLCCGDISQSAVLFLCQGTLAMLDWQN#GSM*GR.S | 0.8122 |
| IPI00395010 | M.LQDDN#TSAGLHFMASVK.K | 0.8773 |
| IPI00395323 | K.ANEQVVQSLN#QTYK.M | 0.9987 |
| IPI00395400 | N.PDASYNLGVLHLDGIFPGVPGRN#QTLAGEIFHK.A | 0.5633 |
| IPI00395488 | R.LPASLAEYTVTQLRPN#ATYSVCVM*PLGPGR.V | 0.9999 |
| IPI00395488 | R.IAQLRPEDLAGLAALQELDVSN#LSLQALPGDLSGLFPR.L | 1 |
| IPI00395488 | R.LHEITN#ETFR.G | 0.9999 |
| IPI00395511 | K.AVEVATVVIQPTVLRAAVPKN#VSVAEGK.E | 0.5478 |
| IPI00395595 | P.SRPSNSN#ISKGESRPK.W | 0.7249 |
| IPI00395632 | R.VN#RSVHEWAGGGGGGGGATYVFK.M | 0.8947 |
| IPI00395659 | K.NKIARLGN#GSQDLNHGVDNENGGR.R | 0.9099 |
| IPI00395659 | K.IARLGN#GSQDLNHGVDNENGGRRGPN#R.T | 0.5352 |
| IPI00395737 | A.DKASDTSSETVFGKRGHVLGN#GSQVTQAANSGCSK.A | 0.8702 |
| IPI00396050 | R.RAEMSQTN#FTPDTLAQNEGK.A | 0.9957 |
| IPI00396080 | K.GRTFN#LTAGNDDSIVMK.A | 0.8603 |
| IPI00396096 | L.N#RSDSDSSTLAK.K | 0.6886 |
| IPI00396103 | M.LN#GTTLEAAMLFHGISGGHIQGIMEEMER.R | 0.5147 |
| IPI00396166 | R.EN#FTQTLPK.M | 0.6497 |
| IPI00396200 | R.VAGAPAPWAAAHGGAM*MDVN#SSGR.P | 0.9741 |
| IPI00396341 | K.HYQTVFLM*RSN#STLNKHNENYKQK.K | 0.8381 |
| IPI00396433 | P.LLPKSSTIEEEEN#M*SGHK.C | 0.6374 |
| IPI00396464 | Q.N#STQDSGPQESEGSAGNSLTVAK.D | 0.6878 |
| IPI00396485 | K.GDIGIVPLGLVETAILKPSMWSTFAPVN#TTT.E | 0.9221 |
| IPI00396500 | K.GQSVSSPPNDCN#ISPAR.V | 0.7878 |

[0217] TABLE 8

N-linked glycosylation sites identified from human
serum/plasma which do not contain the consensus.
N-X-T/S glycosylation motif.

| | |
|---|---|
| Protein IP # | Peptide |

| | | |
|---|---|---|
| (Version 2.21) | Peptide Sequences | Probability |

| | | |
|---|---|---|
| IPI00004574 | K.SGTASVVCLLN*N*FYPR.E | 0.9956 |
| IPI00004617 | V.SVLTVLHQN*WLDGKEYK.C | 0.9847 |
| IPI00006143 | K.N#GREVN#GCSGVN#R.Y | 0.9503 |
| IPI00009464 | K.FDPSTKIYEISN#R.W | 0.9255 |
| IPI00010740 | R.DM#RM#GGGGAM#N*M#GDPYGSGGQK.F | 0.9572 |
| IPI00017648 | R.LLPPN*TVNLPSKVRAFTFPSEVPSK.A | 0.827 |
| IPI00018311 | R.RVTVN*TAYGSN*GVSVLR.I | 0.9984 |
| IPI00019571 | R.N*AN*FKFTDHLK.Y | 0.9542 |
| IPI00019571 | K.SPVGVQPILN*EHTFCAGM#SK.Y | 0.9972 |
| IPI00019571 | K.LRTEGDGVYTLN*NEKQWINK.A | 1 |
| IPI00019943 | K.DLLRN*CCNTENPPGCYR.Y | 1 |
| IPI00021841 | R.LAARLEALKEN*GGAR.L | 0.9896 |
| IPI00021841 | K.LREQLGPVTQEFWDN#LEKETEGLR.Q | 0.9969 |
| IPI00021841 | K.LLDN*WDSVTSTFSK.L | 0.9913 |
| IPI00022229 | R.EYSGTIASEAN*TYLNSK.S | 1 |
| IPI00022229 | Q.FN#N#NEYSQDLDAYNTKDKIGVELTGR.T | 0.9947 |
| IPI00022229 | K.SNTVASLHTEKNTLELSN#GVIVK.I | 0.9107 |
| IPI00022391 | R.AYSLFSYN*TQGRDNELLVYK.E | 0.9993 |
| IPI00022394 | K.TNQVN*SGGVLLR.L | 0.9935 |
| IPI00022395 | R.AIEDYIN*EFSVR.K | 0.991 |
| IPI00022395 | K.TSNFN*AAISLK.F | 0.9665 |
| IPI00022417 | K.LQELHLSSN#GLESLSPEFLRPVPQLR.V | 0.9997 |
| IPI00022432 | R.YTIAALLSPYSYSTTAVVTN*PKE.- | 1 |
| IPI00022432 | R.GSPAIN*VAVHVFR.K | 0.9987 |
| IPI00022463 | R.SM#GGKEDLIWELLN*QAQEHFGKDK.S | 0.9891 |
| IPI00022463 | R.SAGWN#IPIGLLYCDLPEPR.K | 0.9865 |
| IPI00022463 | R.N*TYEKYLGEEYVK.A | 1 |
| IPI00022463 | R.LKCDEWSVN#SVGK.I | 0.9999 |
| IPI00022463 | R.KPVEEYAN#CHLAR.A | 0.9997 |
| IPI00022463 | K.SASDLTWDN*LKGK.K | 0.9901 |
| IPI00022463 | K.LCM*GSGLNLCEPNN#KEGYYGYTGAFR.C | 0.978 |
| IPI00022463 | K.LCM*GSGLN#LCEPNNKEGYYGYTGAFR.C | 0.9989 |
| IPI00022463 | K.IN#HCRFDEFFSEGCAPGSK.K | 0.9473 |
| IPI00022463 | K.IM*N#GEADAMSLDGGFVYIAGK.C | 0.994 |
| IPI00022463 | K.GDVAFVKHQTVPQN#TGGK.N | 0.9999 |
| IPI00022488 | R.YYCFQGN*QFLR.F | 0.9957 |
| IPI00022488 | R.WKN*FPSPVDAAFR.Q | 0.9983 |
| IPI00022488 | L.PPTSAHGN#VAEGETKPDPDVTER.C | 0.9996 |
| IPI00022488 | K.SLGPN#SCSAN#GPGLYLIHGPNLYCYSDVEK.L | 0.9868 |
| IPI00025426 | R.SSGSLLNN*AIK.G | 0.9617 |
| IPI00025426 | R.N*QGN*TWLTAFVLK.T | 0.9985 |
| IPI00025426 | K.ATVLN*YLPK.C | 0.917 |
| IPI00027482 | K.M#N*TVIAALSR.D | 0.9953 |
| IPI00032179 | R.FATTFYQHLADSKNDNDN*IFLSPLSISTAFAM#TK.L | 0.9994 |
| IPI00032179 | R.EVPLN*TIIFMGR.V | 0.9764 |
| IPI00032179 | Q.PLDFKEN#AEQSR.A | 0.9972 |
| IPI00032220 | R.AAM#VGM#LAN*FLGFR.I | 0.9991 |
| IPI00032220 | A.SDLDKVEGLTFQQNSLN*WM#KK.L | 0.9653 |
| IPI00032256 | R.TEVSSN*HVLIYLDK.V | 1 |
| IPI00032256 | R.SLFTDLEAEN*DVLHCVAFAVPK.S | 0.9792 |
| IPI00032256 | R.SASN*M#AIVDVK.M | 0.9209 |
| IPI00032256 | R.HNVYIN#GITYTPVSSTNEKDM*YSFLEDM*GLK.A | 0.9991 |
| IPI00032256 | K.SSSN#EEVM*FLTVQVKGPTQEFK.K | 0.9994 |
| IPI00032256 | K.SKAIGYLN*TGYQR.Q | 0.9968 |
| IPI00032256 | K.QQN#AQGGFSSTQDTVVALHALSK.Y | 0.9999 |
| IPI00032256 | K.N#EDSLVFVQTDK.S | 0.9997 |
| IPI00032256 | K.GVPIPN*KVIFIR.G | 0.9169 |
| IPI00032256 | K.FSGQLN*SHGCFYQQVK.T | 0.9998 |
| IPI00032256 | K.FRVVSMDEN*FHPLNELIPLVYIQDPK.G | 0.9951 |
| IPI00032256 | K.EQAPHCICAN#GR.Q | 0.9933 |
| IPI00032256 | K.ALLAYAFALAGN*QDK.R | 1 |
| IPI00032256 | K.AIGYLN*TGYQR.Q | 0.9984 |
| IPI00032328 | R.IASFSQN#CDIYPGKDFVQPPTK.I | 1 |
| IPI00032328 | R.DIPTN*SPELEETLTHTITK.L | 0.9999 |
| IPI00152059 | R.VEN*SYGQERRCHLM.- | 0.9348 |
| IPI00164623 | R.TVM#VNIEN*PEGIPVK.Q | 0.9888 |
| IPI00164623 | R.TM*QALPYSTVGN#SNNYLHLSVLR.T | 1 |
| IPI00164623 | R.TM#QALPYSTVGN*SNN*YLHLSVLR.T | 1 |
| IPI00164623 | R.AVLYNYRQN*QELK.V | 0.9544 |
| IPI00164623 | K.VHQYFN*VELIQPGAVK.V | 0.9942 |
| IPI00164623 | K.AGDFLEAN*YM#NLQR.S | 0.9398 |
| IPI00167498 | V.QRLAHGLHKVN*TLALK.Y | 0.9251 |
| IPI00175649 | M.KLM*IVGN#TGSGKTTLLQQLM*KTK.K | 0.8308 |
| IPI00216315 | K.IPVVPHN#ECSEVM*SNM*VSENM*LCAGILGDR.Q | 0.944 |
| IPI00216722 | H.LETPDFQLFKN#GVAQEPVHLDSPAIK.H | 0.987 |
| IPI00216773 | K.VFDEFKPLVEEPQNLIKQN#CELFEQLGEYK.F | 1 |
| IPI00216773 | K.VFDEFKPLVEEPQN*LIK.Q | 0.9949 |
| IPI00216773 | K.LVN*EVTEFAK.T | 0.996 |
| IPI00216773 | K.KVPQVSTPTLVEVSRN*LGK.V | 0.9626 |
| IPI00216773 | K.FQN*ALLVR.Y | 0.9105 |
| IPI00218017 | R.YN*RQIGEFIVTR.A | 0.8035 |
| IPI00218199 | K.DKQIITFFSPLTILVGPN#GAGK.T | 0.9318 |
| IPI00218732 | K.GIETGSEDLEILPN#GLAFISSGLKYPGIK.S | 0.9999 |
| IPI00220120 | K.NTLYLQMN*SLR.A | 0.9772 |
| IPI00220591 | E.RAN*SHIFLYGDLR.S | 0.9594 |
| IPI00250430 | M.VTFSN#TLPRAN#TPSVEDPVR.R | 0.8977 |
| IPI00292530 | R.VQSWKGSLVQASEAN*LQAAQDFVR.G | 0.9955 |
| IPI00292530 | R.GRFPLYNLGFGHNVDFN#FLEVMSM*ENNGR.A | 1 |
| IPI00292530 | K.GSLVQASEAN*LQAAQDFVR.G | 1 |
| IPI00294193 | R.AISGGSIQIEN#GYFVHYFAPEGLTTM*PK.N | 0.9971 |
| IPI00294193 | A.EKN*GIDIYSLTVDSR.V | 0.9145 |
| IPI00296608 | R.YSAWAESVTN*LPQVIK.Q | 0.9949 |
| IPI00298828 | R.VCPFAGILEN*GAVR.Y | 0.9929 |
| IPI00298828 | K.CPFPSRPDN#GFVN#YPAKPTLYYK.D | 0.9996 |
| IPI00299475 | K.SSTLKPTIEALPN#VLPLNEDVN#K.Q | 0.9435 |
| IPI00305457 | R.TLNQPDSQLQLTTGN*GLFLSEGLK.L | 1 |
| IPI00305457 | N.KITPN*LAEFAFSLYR.Q | 0.9594 |
| IPI00305457 | N.ATAIFFLPDEGKLQHLEN#ELTHDIITK.F | 0.9995 |
| IPI00305457 | L.PDEGKLQHLEN#ELTHDIITK.F | 0.9999 |
| IPI00305457 | K.TDTSHHDQDHPTFN*KITPNLAEFAFSLYR.Q | 1 |
| IPI00305457 | K.QIN*DYVEKGTQGK.I | 0.9336 |
| IPI00305457 | K.LQHLEN*ELTHDIITK.F | 0.9989 |
| IPI00305457 | K.ITPN*LAEFAFSLYR.Q | 0.9708 |
| IPI00305457 | K.ELDRDTVFALVN#YIFFK.G | 0.998 |
| IPI00305457 | I.FFLPDEGKLQHLEN*ELTHDIITK.F | 0.9924 |
| IPI00305457 | A.TAIFFLPDEGKLQHLEN#ELTHDIITK.F | 0.9957 |
| IPI00305461 | R.KLWAYLTIN*QLLAER.S | 1 |
| IPI00328609 | R.GFQHLLHTLN*LPGHGLETR.V | 0.9993 |
| IPI00328609 | K.IAPAN*ADFAFR.F | 0.9553 |
| IPI00332161 | V.VSVLTVLHQDWLN*GK.E | 1 |
| IPI00332161 | K.N*QVSLTCLVK.G | 0.9708 |
| IPI00332161 | K.GFYPSDIAVEWESN*GQPEN*NYK.T | 1 |
| IPI00332161 | K.FNWYVDGVEVHN*AK.T | 0.9507 |
| IPI00373776 | K.NSLYLQMN*SLR.A | 0.9973 |
| IPI00375506 | R.GLESQTKLVN#GQSHISLSK.A | 0.9999 |
| IPI00375506 | K.AEFQDALEKLN#M*GITDLQGLR.L | 0.9973 |
| IPI00382950 | R.FFESFGDLSTPDAVM#GN*PK.V | 0.995 |
| IPI00383035 | R.MKGLIDEVN*QDFTNR.I | 0.9957 |
| IPI00383317 | V.FSN#GADLSGVTEEAPLKLSK.A | 0.9915 |
| IPI00383317 | K.VFSN*GADLSGVTEEAPLKLSK.A | 1 |
| IPI00383317 | K.SVLGQLGITKVFSN*GADLSGVTEEAPLKLSK.A | 0.9986 |
| IPI00383317 | K.FNKPFVFLM#IEQN*TK.S | 0.9901 |
| IPI00384391 | R.DNSKN*SLYLQM#NSLR.A | 1 |
| IPI00385298 | K.HFLMEN*INNEN*KGSIN*LKRKHI.T | 0.9997 |
| IPI00385332 | K.DSLYLQMN*SLR.V | 0.9943 |

### EXAMPLE 6

### Identification of Early Disease Biomarkers Using Tissue Specimens and Body Fluids

[0218] This example describes the identification of disease biomarkers from prostate cancer tissues.

[0219] Proteins expressed on the cell surface or secreted from cells in disease tissues are likely to leak to body fluids at an early stage of disease development and can be detected in body fluids as diagnostic markers. This is demonstrated by several tumor biomarkers currently in clinical use (see Table 9). In general, identification of cell surface proteins or secreted proteins of cells is difficult due to contamination with extremely complex mixtures of intracellular proteins of high abundance.

TABLE 9
Known tumor markers.
Current tumor markers

| Tumor | Protein | | |
|---|---|---|---|
| markers | Name/Function | Cancer Site | Glycosylation |
| CEA | Carcinoembryonic | Colon,Lung | glycoprotein |
| | antigen | | |
| AFP | A-Fetoprotein | Liver, germ cell cancer | glycoprotein |
| | | of ovaries or testis | |
| PAP | Prostatic acid | Prostate, myeloma, lung | glycoprotein |
| | phosphatase | cancer, osteogenic | |
| | | sarcoma | |
| HCG | Human chorionic | Gestational trophoblastic | glycoprotein |
| | gonadotropin | tumor | |
| PSA | Prostate specific | Prostate | glycoprotein |
| | antigen | | |
| CA125 | Ovarian cancer | Ovarian | glycoprotein |
| | marker CA125 | | |

[0220] Several approaches have been used in an attempt to enrich for cell surface proteins or secreted proteins from cultured cells. These methods includes (1) differential centrifugation (Han et al., Nat. Biotechnol. 19:946-951 (2001)), (2) chemical labeling of cell surface proteins to introduce tags attached to cell surface proteins before lysing cells, and (3) extraction of secreted proteins in cell culture medium secreted from cells (Martin et al., Cancer Res. 64:347-355 (2004)). However, none of these methods can be applied to tissue specimens, which contain potential biomarkers for human diseases.

[0221] Most proteins expressed on the cell surface and/or secreted by cells are glycosylated (Durand and Seta, Clin. Chem. 46:795-805 (2000)). Glycoproteins from disease specimens were isolated using a glycopeptide capture method (see Examples 1-5)(Zhang et al., Nat. Biotechnol. 21:660-666 (2003)). Tissue specimens can be obtained from fresh tissues, in which case tissues are minced and digested with collagenase in serum free medium. Both single cells from tissue specimens and cell free supernatants are collected and subjected to glycopeptide capture to enrich for cell surface proteins from cells and/or secreted proteins in the extracellular matrix that are released to the supernatant after collagenase digestion. Tissue specimens can be obtained from frozen sections, in which case tissues are ground with a blender or tissue homogenizer, and the proteins in the microsomal fraction and supernatant are collected. The glycopeptide capture method is then used to isolate membrane proteins from microsomal fractions and/or secreted proteins from the supernatant.

[0222] Using the glycopeptide capture method, isolated formerly glycosylated peptides were identified and quantified by tandem mass spectrometry. The expression of these proteins in body fluids was further determined by antibody based assays or stable isotope labeled synthetic peptides originally identified from tissues. The identification of proteins from disease tissues and detection of these proteins in body fluids can be used to determine specific protein changes related to certain disease states or cancer for diagnostic biomarkers or immunotherapy targets.

[0223] Proteins in body fluids have been used to discover biomarkers related to disease states for years, and the advancement of proteomic technologies provides the opportunity to identify additional disease markers and/or potential therapeutic targets. Despite the efforts to identify biomarkers in body fluids, most protein markers identified in body fluids using proteomic approaches are abundant proteins and not specific to a particular disease (Diamandis, Mol. Cell. Proteomics 3:367-378 (2004)). This is due to the peculiar protein content of most body fluids, which are highly complex but contain a few abundant proteins representing most of the protein content. In addition, the protein content of body fluids varies over time in an individual due to different physiological and pathological influences. The protein content of body fluids also varies among individuals in a population. Due to these factors, identifying biomarkers in body fluids for specific disease is extremely challenging.

[0224] Using the glycopeptide capture method, secreted proteins and cell surface proteins were identified from tissues. It was determined whether the glycoproteins were present in body fluids using targeted proteomic approaches, including antibody based method and synthetic heavy-isotope labeled peptides (Pan et al., Mol. Cell. Proteomics 4:182-190 (2005)). Since cell surface proteins and secreted proteins are highly glycosylated and likely to leak to body fluids in an early stage of disease development, cell surface proteins or secreted proteins can be identified as potential targets for candidate biomarkers in body fluids. A more sensitive and targeted approach can further be used to determine their diagnostic value in body fluids.

[0225] Glycoproteins have been isolated from cell free supernatant of prostate cancer tissues. Over 100 proteins have been identified and quantified (Table 10). Most proteins identified are proteins located in the extracellular environment in spite of the high contamination of intracellular proteins in cell free supernatant during tissue sample preparation. It was found that 61% of the identified proteins were secreted proteins, 18% of the proteins were extracellular matrix proteins, 10% of the proteins were transmembrane proteins, and only 11% of the proteins were from intracellular proteins. Protein network analysis showed that 5 out of 6 protein changes were located in one network (FIG. 17). Heavy isotope labeled peptides were synthesized and mixed with N-linked glycopeptides isolated from serum (see FIG. 4). The relative abundances of these peptides were quantified among individuals (see FIG. 16). The protein TIMP 1 has also been found to be decreased in prostate cancer patients relative to normal patients (Liu et al., J. Urol. 173:73-78 (2005).

TABLE 10

Identification of proteins and relative abundance changes
in cancer tissues compared to patient matched normal
tissues.

Ratio

| | |
|---|---|
| Protein IPI # | (Cancer/ |

| | | |
|---|---|---|
| (Version 2.28) | Peptide sequences | Normal) |

| | | |
|---|---|---|
| IPI00004573 | R.LSLLEEPGN*GTFTVILNQLTSR.D | |
| IPI00004617 | R.EQQFNSTFR.V | |
| IPI00004618 | R.EEQFN*STYR.V | |
| IPI00004641 | R.LAGKPTHVN*VSVV.M | |
| IPI00004641 | V.QGFFPQEPLSVTWSESGQN*VTAR.N | |
| IPI00005794 | K.IVVYNQPYIN*YSR.T | |
| IPI00005794 | R.GKIVVYNQPYINYSR.T | |
| IPI00006154 | R.LQNNENN*ISCVER.G | |
| IPI00006662 | R.ADGTVNQIEGEATPVN*LTEPAKLEVK.F | |
| IPI00007244 | R.SCPACPGSN*ITIR.N | |
| IPI00007778 | A.NAPYN*QTLTGYNDYIK.M | |
| IPI00009030 | R.VQPFN*VTQGK.Y | |
| IPI00009802 | R.TLYRFEN*QTGFPPPDSR.F | |
| IPI00010858 | R.NKSVILLGR.H | down |
| IPI00010949 | R.ALAYGEKN*LTFEGPLPEKIELLAHK.G | |
| IPI00011229 | K.YYKGSLSYLN*VTR.K | |
| IPI00011302 | K.TAVNCSSDFDACLITK.A | |
| IPI00011302 | S.LQCYNCPNPTADCK.T | |
| IPI00012503 | R.NLEKN*STKQEILAALEK.G | |
| IPI00012887 | K.YSVANDTGFVDIPKQEK.A | |
| IPI00013179 | K.SVVAPATDGGLN*LTSTFLR.K | |
| IPI00013179 | K.SVVAPATDGGLN*LTSTFLRK.N | |
| IPI00013446 | K.AQVSNEDCLQVEN*CTQLGEQCWTAR.I | |
| IPI00013449 | K.ALKQYN*STGDYR.S | |
| IPI00013698 | K.ILAPAYFILGGN*QSGEGCVITR.D | |
| IPI00013976 | T.AASEETLFN*ASQR.I | |
| IPI00015028 | R.SFM#VN*WTHAPGNVEK.Y | |
| IPI00015102 | K.IIISPEEN*VTLTCTAENQLER.T | |
| IPI00017601 | K.EHEGAIYPDNTTDFQR.A | |
| IPI00017601 | K.ELHHLQEQNVSNAFLDK.G | |
| IPI00019571 | K.VVLHPNYSQVDIGLIK.L | |
| IPI00019591 | R.SPYYN*VSDEISFHCYDGYTLR.G | |
| IPI00020986 | R.NNQIDHIDEKAFENVTD.L | down |
| IPI00021891 | K.VDKDLQSLEDILHQVEN*KTSEVK.Q | |
| IPI00022255 | R.VNLTTN*TIAVTQTLPNAAYNNR.F | |
| IPI00022418 | K.LDAPTNLQFVN*ETDSTVLVR.W | |
| IPI00022429 | R.QDQCIYNTTYLNVQR.E | |
| IPI00022431 | K.AALAAFNAQNN*GSNFQLEEISR.A | |
| IPI00022431 | K.VCQDCPLLAPLNDTR.V | |
| IPI00022463 | R.QQQHLFGSNVTDCSGNFCLFR.S | |
| IPI00022488 | R.SWPAVGNCSSALR.W | |
| IPI00022488 | K.ALPQPQNVTSLLGCTH.- | |
| IPI00022792 | R.VDLEDFENNTAYAK.Y | |
| IPI00022892 | R.LDCRHEN*TSSSPIQYEFSLTR.E | up |
| IPI00023673 | R.ALGFENATQALGR.A | down |
| IPI00023673 | R.DAGVVCTN*ETR.S | |
| IPI00023673 | K.GLNLTEDTYKPR.I | |
| IPI00023673 | R.TVIRPFYLTN*SSGVD.- | |
| IPI00023673 | R.YKGLN*LTEDTYKPR.I | |
| IPI00024284 | R.SLTQGSLIVGDLAPVN*GTSQGK.F | |
| IPI00024284 | R.IQGEEIVFHDLN*LTAHGISHCPTCR.D | |
| IPI00024284 | R.NLHQSN*TSRAELLVTEAPSKP.I | |
| IPI00024284 | R.VAQQDSGQYICN*ATSPAGHAEAT.I | |
| IPI00027482 | R.AQLLQGLGFNLTER.S | |
| IPI00027827 | R.AKLDAFFALEGFPTEPN*SSSR.A | |
| IPI00027851 | K.SAEGTFFIN*KTEIEDFPRFPHR.G | |
| IPI00028908 | R.IHQN*ITYQVCR.H | |
| IPI00029739 | K.IPCSQPPQIEHGTINSSR.S | |
| IPI00031008 | R.CIN*GTCYCEEGFTGEDCGKPTCPHACHTQGR.C | |
| IPI00032256 | K.SLGNVNFTVSAEALESQELCGTEVPSVPEHGRK.D | |
| IPI00032292 | R.SHN*RSEEFLIAGK.L | down |
| IPI00032292 | R.AKFVGTPEVNQTTLYQR.Y | |
| IPI00032292 | K.FVGTPEVNQTTLYQR.Y | |
| IPI00032292 | K.FVGTPEVN*QTTLYQRYEIK.M | |
| IPI00032328 | K.LNAENNATFYFK.I | |
| IPI00043716 | K.KLRLPDTGLYNMTDSG.T | |
| IPI00098026 | R.LHNQLLPN*VTTVER.N | |
| IPI00163563 | K.VISLLPKENKTR.G | |
| IPI00164623 | K.TVLTPATNHM#GN*VTFTIPANR.E | |
| IPI00166729 | R.FGCEIENN*R.S | |
| IPI00166729 | K.DIVEYYN*DSN*GSHVLQGR.F | |
| IPI00166729 | R.FGCEIENNRSSGAFWK.Y | |
| IPI00168520 | V.AN*FSQIETLTSVFQK.K | |
| IPI00168728 | R.EEQFN*STFR.V | |
| IPI00169285 | R.SDLNPAN*GSYPFKALR.Q | |
| IPI00171411 | R.LQQDVLQFQKN*QTNLER.K | |
| IPI00178017 | R.KFDVNQLQNTTIKR.I | |
| IPI00178926 | R.IIVPLNNREN*ISDPTSPLR.T | |
| IPI00215998 | R.QQMENYPKNNHTASILDR.M | |
| IPI00215998 | K.NRVPDSCCIN*VTVGCGINFNEK.A | |
| IPI00217503 | R.TATESFPHPGFN*NSLPNKDHR.N | |
| IPI00221224 | K.AEFNITLIHPK.D | |
| IPI00221224 | K.GPSTPLPEDPNWN*VTEFHTTPK.M | |
| IPI00221224 | K.KLNYTLSQGHR.V | |
| IPI00221224 | V.LLNLNVTGYYR.V | |
| IPI00221224 | R.N*ATLVNEADKLR.A | |
| IPI00221224 | V.TLALNNTLFLIEER.Q | |
| IPI00247063 | R.SCIN*ESAIDSR.G | |
| IPI00289489 | R.AQQLLAN*STALEEAMLQEQQR.L | |
| IPI00289489 | R.KQELSRDN*ATLQATLHAAR.D | |
| IPI00289489 | G.LAN*ASAPSGEQLLR.T | |
| IPI00289489 | R.LHRLNASIADLQSQLR.S | |
| IPI00289489 | K.RLNTTGVSAGCTADLLVGR.A | |
| IPI00289983 | R.KFLN*ESYK.H | down |
| IPI00289983 | K.FLNESYKHEQVYIR.S | |
| IPI00289983 | R.KFLNESYKHEQ.V | |
| IPI00289983 | R.KFLNESYKHEQVYIR.S | |
| IPI00291262 | R.LANLTQGEDQYYLR.V | |
| IPI00291866 | K.VGQLQLSHN*LSLVILVPQNLK.H | |
| IPI00292069 | K.GSQWSDIEEFCN*R.S | |
| IPI00292732 | R.LYLDHN*NLTR.M | |
| IPI00293088 | R.GVFITNETGQPLIGK.V | |
| IPI00293088 | K.VTVLGVATAPQQVLSN*GVPVSN*FTYSPDTK.A | |
| IPI00296141 | R.ALAGLVYN*ASGSEHCYDIYR.L | |
| IPI00296141 | R.FGN*KTFPQR.F | |
| IPI00296170 | K.NLFLNHSEN*ATAK.D | |
| IPI00296170 | K.MVSHHN*LTTGATLINEQWLLTTAK.N | |
| IPI00296922 | R.CAPNFWN*LTSGHGCQPCACHPSR.A | |
| IPI00298281 | R.TLAGENQTAFEIEELNR.K | |
| IPI00298281 | R.EGFVGNRCDQCEENYFYNR.S | |
| IPI00298281 | R.IASAVQKNATSTKAEAER.T | |
| IPI00298281 | R.KIPAINQTITEANEK.T | |
| IPI00298281 | K.LLNN*LTSIK.I | |
| IPI00298281 | K.QVLSYGQNLSFSFR.V | |
| IPI00298281 | K.TANDTSTEAYNLLLR.T | |
| IPI00298828 | R.VYKPSAGNNSLYR.D | |
| IPI00298828 | K.LGN*WSAM#PSCK.A | |
| IPI00298860 | R.TAGWNIPMGLLFN*QTGSCK.F | |
| IPI00298860 | K.FGRN*GSDCPDKFCLFQSETK.N | |
| IPI00298971 | R.PQPPAEEELCSGKPFDAFTDLKN*GSLFAFR.G | |
| IPI00299547 | K.SYN*VTSVLFR.K | |
| IPI00301579 | K.GQSYSVNVTFTSNIQSK.S | |
| IPI00305064 | K.AFN*STLPTM#AQMEK.A | |
| IPI00305457 | K.YLGNATAIFFLPDEGK.L | |
| IPI00328113 | R.VLPVNVTDYCQLVR.Y | down |
| IPI00328113 | R.CDSGFALDSEERN*CTDIDECR.I | |
| IPI00328113 | K.AWGTPCEM#CPAVNTSEYK.I | |
| IPI00328113 | R.NYYADN*QTCDGELLFN*MTKK.M | |
| IPI00328488 | R.RPYVSYVNN*SIAR.N | |
| IPI00329482 | I.SAQYAN*FTGCISNAYFTR.V | |
| IPI00329482 | R.DAVRN*LTEVVPQLLDQLR.T | |
| IPI00329573 | R.NLQVYNATSNSLTVK.W | |
| IPI00329573 | P.LTDQGTTLYLN*VTDLK.T | |
| IPI00332161 | R.EEQYNSTYR.V | |
| IPI00332161 | K.TKPREEQYNSTYR.V | |
| IPI00333982 | R.EEQYN*STFR.V | |
| IPI00333982 | K.TKPREEQYNSTFR.V | |
| IPI00335256 | K.FN*LTETSEAEIHQSFQHLLR.T | |
| IPI00374091 | R.LHNKLLPNVTTVER.N | |
| IPI00375506 | R.GLNVTLSSTGR.N | |
| IPI00375506 | R.FSDGLESNSSTQFEVK.K | |
| IPI00375947 | S.EGSSNTTEATSGSGVR.G | |
| IPI00382512 | K.M#SIQGCVAQPSSFLLNHTR.Q | |
| IPI00383517 | R.AVCGGVLVHPQWVLTAAHCIRN*K.S | |
| IPI00383981 | R.FVN*VTVTPEDQCRPNNVCTGVLTR.R | |
| IPI00385514 | H.VSNVTVN*YN*VTVERM#NR.M | |
| IPI00386236 | K.YKNNSDISSTR.G | |
| IPI00386236 | R.GLTFQQN*ASSM#CVPDQDTAIR.V | |

### EXAMPLE 7

### Identification of Proteotypic N-linked Glycopeptides for Serum Protein Analysis

[0226] Theoretically, one unique peptide per protein that can be observed by mass spectrometry is sufficient for unambiguously identifying and quantifying a parent protein. If such proteotypic peptides can be isolated and selectively analyzed by mass spectrometry, the complexity of proteome profiling could be reduced by one or two orders of magnitude. This increases the sensitivity, throughput and reproducibility of scoring phase studies. Protein glycosylation, especially N-linked glycosylation, is very common post-translational modification for proteins expressed on extracellular surfaces, in cell secretions, and for proteins contained in body fluids. These are the most easily accessible human proteins for diagnostic purposes, and the literature confirms that glycoproteins constitute a large number of clinical biomarkers (Table 11). A method was developed to isolate N-linked glycopeptides (Zhang et al., Nat. Biotechnol. 21:660-666 (2003)). By selectively isolating a subset of N-linked glycopeptides, the procedure achieves a significant reduction in analyte complexity and increases the sensitivity for serum proteomic analysis at two levels: first, a reduction of the total number of peptides due to the fact that every serum protein on average only contains a few N-linked glycosylation sites, and second, a reduction of pattern complexity by removing the oligosaccharides that contribute significantly to the peptide pattern heterogeneity. It is therefore believed that the quantitative analysis of these formerly N-linked glycopeptides has potential use for detecting new diagnostic markers (Zhang et al., Nat. Biotechnol. 21:660-666 (2003); Zhang et al., Mol. Cell. Proteomics 4:144-155 (2005).

TABLE 11
Most known clinical tumor markers are glycoproteins

| Tumor | Protein | | |
|---|---|---|---|
| markers | Name/Function | Cancer Site | Glycosylation |
| CEA | Carcinoembryonic | Colon, Lung | glycoprotein |
| | antigen | | |
| AFP | A-Fetoprotein | Liver, germ cell cancer | glycoprotein |
| | | of ovaries or testis | |
| NSE | Neuron specific | Neuroblastoma, small | unknown |
| | enolase | cell lung cancer | |
| PAP | Prostatic acid | Prostate, myeloma, | glycoprotein |
| | phosphatase | lung cancer, | |
| | | osteogenic sarcoma | |
| HCG | Human chorionic | Gestational trophoblastic | glycoprotein |
| | gonadotropin | tumor | |
| PSA | Prostate specific | Prostate | glycoprotein |
| | antigen | | |
| CA125 | Ovarian cancer | Ovarian | glycoprotein |
| | marker CA125 | | |

[0227] For chromatography procedures, HPLC-grade reagents were purchased from Fisher Scientific (Pittsburgh, USA). PNGase F was purchased from New England Biolabs (Beverly, Mass.) and hydrazide resin from Bio-Rad (Hercules, Calif.). All other chemicals and the human serum used in this study were purchased from Sigma (St. Louis, USA).

[0228] Purification and Fractionation of Formerly N-linked Glycosylated Peptides from Serum by SCX. 0.75 ml serum was used to isolate N-linked glycopeptides (Zhang et al., Nat. Biotechnol. 21:660-666 (2003)), which were fractionated by strong cation-exchange chromatography into 43 fractions as described previously (Han et al., Nat. Biotechnol. 19:946-951 (2001)).

[0229] Analysis of Peptides by Mass Spectrometry. Fractionated peptides were analyzed using a LCQ ion trap mass spectrometer (Finnigan, San Jose, Calif.) or ESI-qTOF mass spectrometer (Waters, Milford, Mass.) as described previously (Pieper et al., Proteomics 3:422-432 (2003)). Using SEQUEST, acquired MS/MS spectra were compared against the International Protein Index (IPI) human protein database (version 2.28). For MS/MS spectra acquired by the ESI-qTOF mass spectrometer, the mass window of each peptide was given a tolerance of 0.4 Da between the measured monoisotopic mass and calculated monoisotopic mass; the b and y ion series of database peptides were included in the SEQUEST analysis. For MS/MS spectra acquired via the Finnigan mass spectrometer, the mass window for each peptide was given a tolerance of 3 Da between the measured average mass and calculated average mass; the b and y ion series were included in the SEQUEST analysis. The database sequence tool was set to the following modifications: carboxymethylated cysteines, oxidized methionines, and an enzyme-catalyzed conversion of Asn to Asp at the site of carbohydrate attachment. No other constraints were included in the SEQUEST searches. Search results were further analyzed with a suite of software tools that included INTERACT (Han et al., Nat. Biotechnol. 19:946-951 (2001)) and PeptideProphet (Keller et al., Anal. Chem. 74:5383-5392 (2002)). All MS/MS spectra were manually checked to verify the validity of the database search results.

[0230] Amino acid preference around the glycosylation sites. Position-independent amino acid abundance ratios were first calculated for each protein corresponding to one or more peptides from the set of all identified N-linked glycopeptides using the sequence information contained in the human International Protein Index version 2.28. This yielded a mean abundance and variance for each amino acid in the set of all identified proteins. The relative abundance of each amino acid was then calculated for all positions plus or minus twenty residues from the asparagine in the NX(T/S) motif using the set of identified N-linked glycopeptides, where the asparagine was taken to be at position zero. A “probability” score describing the bias for each amino acid at each position was generated by calculating the deviation of the observed abundance for that amino acid at that position from its position-independent abundance, then dividing by the standard deviation in the position-independent abundances for that amino acid in all identified proteins.

[0231] Subcellular Localization of Identified Proteins. Signal peptides were predicted using signalP 2.0 (19). Transmembrane (TM) regions were predicted using TMHMM(version 2.0) (Krogh et al., J. Mol. Biol. 305:567-580 (2001)). The TMHMM program predicts protein topology and the number of TM helices. Information from signalP and TMHMM were combined to separate proteins into the categories: 1) membrane bound, 2) soluble, 3) secreted and 4) membrane proteins anchored by an uncleaved signal peptide also predicted to be a trans membrane helix. All protein sequences were taken from IPI version 2.28.

[0232] Identification of Serum Peptides Using SPEG and Tandem Mass Spectrometry. To assess the potential of the proposed glycopeptide capture method for serum protein profiling, four 0.75 ml of serum was processed using SPEG as described previously (Zhang et al., Nat. Biotechnol. 21:660-666 (2003)). Formerly N-linked glycosylated peptides were fractionated by two dimensional chromatography using cation exchange fractionation and reverse phase liquid chromatography (RP-LC). Peptide mixtures were sequentially analyzed by electrospray ionization tandem mass spectrometry (ESI-MS/Miss.) (Han et al., Nat. Biotechnol. 19:946-951 (2001)). The resulting collision induced dissociation (CID) spectra were used to perform searches within the human International Protein Index sequence database (IPI version 2.28 with 41100 entries); database search results were statistically analyzed using PeptideProphet (Keller et al., Anal. Chem. 74:5383-5392 (2002)).

[0233] Most cancer-specific serum biomarkers consist of low-abundance serum proteins. According to these results, a significant number of proteins identified in the present study belong to low-abundance serum protein groups such as growth factors, cell surface receptors, and channel or transporter proteins. Several previously identified serum markers were also identified, such as the MAC-2 binding protein and the ovarian cancer-related tumor marker CA125. The MAC-2 binding protein belongs to a family of beta-galactoside-binding proteins (also known as galectins) that are thought to modulate cell-cell and cell-matrix interactions. MAC-2 binding protein is present in normal serum in the μg/ml range and elevated levels of MAC-2 binding protein (≧11 μg/ml) have been found in the sera of cancer patients (Bresalier et al., Gastroenterology 127, 741-748 (2004): Marchetti et al., Cancer Res. 62:2535-2539 (2002)). An increase in serum CA125 is considered an accurate and reliable measure of responses to treatment and relapses in ovarian cancer patients (Guppy et al., Oncologist 7:437-443 (2002)).

[0234] Identification of Nonredundant N-linked Glycopeptides as Proteotypic Peptides. N-linked glycosylation sites in peptide sequences are generally fall into the N-X-T/S sequon (Bause, Biochem. J. 209:331-336 (1983)). From the set of all peptides identified above, a list of non-redundant N-linked glycopeptides for each sequon was generated as follows. First, the identified sequences were filtered for the presence of the N-X-T/S sequon to remove peptides not containing the sequon. Non-sequon-containing peptides can come from two sources. The first is peptides from non-specific isolation of N-linked glycopeptides (selectivity of the method) and the second is peptides that are incorrectly identified by SEQEST search (false positive identifications). In the present analysis, the false positive error rate was estimated by the PeptideProphet statistical model (Zhang et al., Mol. Cell. Proteomics 4:144-155 (2005)). Second, a minimum probability score of 0.5 was used to filter out low probability sequon-containing peptides. And finally, redundant peptides with overlapping sequences containing the same sequons were resolved in favor of those sequences which contained the greater number of tryptic ends. Using the two-dimensional peptide separation protocol for analyzing formerly N-linked glycopeptides, we identified 3244 nonredundant N-linked glycosylation sites were identified, representing 2585 unique proteins with a PeptideProphet score at least 0.5 (Table 7). 2106 peptides are unique to a single database entry, and thus selected as experimentally identified proteotypic peptides, representing a total of 1671 proteins.

[0235] This indicates that the combination of solid-phase N-linked glycopeptide capture and tandem mass spectrometry is able to identify a large number of peptides with consensus N-linked glycosylation sites from serum with high confidence. These peptides can now be used as standard peptides to identify and quantify the same peptides from samples isolated by glycopeptide capture method with different biological or physiological relevance (Pan et al., Mol. Cell. Proteomics 4:182-190 (2005)).

[0236] Determination of amino acid preference around N-linked glycosylation sequon using the experimentally identified N-linked glycopeptides. While each protein containing multiple N-linked glycosylation sequons can generate multiple possible tryptic peptides, not all potential N-linked tryptic glycopeptides were identified by the large scale mass spectrometry analysis (Table 7). The reasons for this are that not all NXT/S sequons are occupied (Petrescu et al., Glycobiology 14:103-114 (2004)) and that only a portion of a protein's possible peptides exhibit particular physico-chemical properties such that they are consistently observed by a mass spectrometer (Mallick, P. et al., In Preparation (2005)). Determining the amino acid specificity around N-linked glycopeptides detected by a mass spectrometer offers the possibility of developing a refined N-linked glycosylation motif to predict occupation of the glycosylation sequon. This refined motif can then be used to scan protein databases to computationally predict proteotypical glycopeptides for the subsequent use in the scoring phase analysis of serum proteins. In general, a proteotypic N-linked glycopeptide is determined by a short linear sequence motif that occurs around the N-linked glycosylation and trypsin cleavage sites. The large number of N-linked glycopeptide sequences identified here allows statistical characterization of the preference for each amino acid at each position around the NXT/S motif. Specifically, the relative occurrence of each amino acid at each position around identified N-linked glycosylation sites, from −20 to +20 (where position 0 is taken to be the asparagine that oligosaccharide is formerly attached to), has been calculated. This region was chosen to include residues immediately around the glycosylation site that may interact with the translocon complex where glycosylation occurs (glycosylation occurring approximately 30 residues from the ribosome (Varki, Essentials of Glycobiology, Cold Spring Harbor Laboratory Press, Cold Spring Harbor, N.Y., (1999).). The occurrence of finding each amino acid at each sequence position (Fₚₒₛ) was compared with the average occurrence (Fₐᵥₑ) of each amino acid at any position in the set of identified proteins. The probabilities (P) of each amino acid occurrence in each position were determined in standard deviations (s) relative to the average occurrence:
P=(Fₚₒₛ−Fₒᵥₑ)/s

[0237] It was found that significant biases in amino acid occurrence only appear in the immediate vicinity of the glycosylation site (−3 to +5). There is a marked preference for non-charged amino acids and discrimination against charged amino acids (D, E, R, K) as well as proline on either side of the glycosylation site (FIGS. 18A and 18B). With the exception of W, there is also an increased probability of finding bulky hydrophobic amino acids, such as M, F, and Y, immediately before a glycosylation site (−3, −2, and −1), and there is an increased probability of finding small, non-charged amino acids (L, S, V, I, A) at positions +1, +3, +4, and +5. In addition, at either side of the glycosylation site, the identified N-linked glycopeptides appear selective against amino acids that are likely to be modified (W and C) at either sides of the glycosylation site. These data indicate that there is well-defined specificity for a protetypical N-linked glycopeptide that is likely to be detected by mass spectrometry.

[0238] Computational prediction of N-linked glycopeptides as proteotypical peptides. Next the large number of N-linked glycopeptides identified in this study was used to generate predictors to score all the theoretical tryptic N-linked glycopeptides from human IPI database (version 2.28). It allowed us to predict the likelihood of occupancy for an N-X-T/S sequon (Yaffe et al., Nat. Biotechnol. 19:348-353 (2001)) and its detection possibility by mass spectrometer (Mallick, P. et al., In Preparation (2005)). A web interface, UniPep, was developed for displaying N-X-T/S sequon containing peptides in the human IPI database for predicted or experimentally identified proteotypic N-linked glycopeptides. This is of particular relevance with respect to those genes or proteins that have been shown to change their abundance in disease tissues compared to normal tissues using genomic or proteomic approaches. The detection of these proteins in serum, especially secreted proteins or extracellular surface proteins which are most likely to make their way into blood serum, is a critical step in the development of these proteins as disease biomarkers. In this case, the proteotypical N-linked glycopeptides are predicted by their sequences and heavy isotopic labeled peptides can be synthesized as candidates to determine their presence and quantify their abundance in serum.

[0239] Four different types of information were used to predict proteotypical N-linked glycopeptides when scanning the IPI protein database. First, since N-linked glycosylation is likely to occur on the extracellular surface or secreted proteins, the subcellular localization of each protein was predicted using a combination of hidden Markov model (HMM) algorithms Nielsen et al., Protein Eng. 10:1-6 (1997), and transmembrane (TM) region predictions using a commercial version of the TMHMM algorithm Krogh et al., J. Mol. Biol. 305:567-580 (2001). By so doing, the subcellular localizations of each protein was able to be categorized as being either a) extracellular—proteins that contained predicted non-cleavable signal peptides and no predicted transmembrane segments; b) secreted—proteins that contained predicted cleavable signal peptides and no predicted transmembrane segments; c) transmembrane—proteins that contained predicted transmembrane segments and extracellular loops and intracellular loops; and d) intracellular—proteins that contained neither predicted signal peptides nor predicted transmembrane regions. The predicted protein subcellular localization is displayed in UniPep along with other protein information from database annotations (FIG. 19, Protein infor), and the signal peptides and transmembrane sequences are highlighted in the protein sequence to give a general indication of the protein topology. NXS/T score for predicted peptides). For all predicted peptides that have also been experimentally identified in the dataset, the Peptide ProPhet score and the tissue resources from which the peptides were identified are indicated as well. Third, the experimentally identified N-linked glycopeptides were used to calculate peptide frequencies that are likely to be detected by mass spectrometry and identify a set of physico-chemical properties that distinguish observed peptides by MS from unobserved peptides (Mallick, P. et al., In Preparation (2005)). The physico-chemical properties determined from the identified peptides were used to score the likelihood of a potential N-linked glycopeptide to be detected by MS (FIG. 19, detection probability). Fourth, the uniqueness of each predicted N-linked glycopeptide was determined by searching for each sequence within the entire IPI protein database. Peptides present in multiple proteins were indicated by multiple database hits (FIG. 19, Number of other proteins with the peptide). Uniqueness of a peptide sequence to a particular protein was taken to be a necessary condition for being a proteotypic peptide.

[0240] Applying the protein subcellular localization prediction method to all 40,110 protein entries in the IPI database, it was predicted that 14041 proteins are exposed to extracellular environment as secreted, transmembrane, or extracellular surface proteins (Table 12). Of these, 76% contain at least one N-linked glycosylation sequon that is potentially N-linked glycosylated and can be detected by a proteotypic N-linked glycopeptide (Table 14). In other words, profiling proteotypical N-linked glycopeptides can capture a large number of proteins in the extracellular environment that derive from variety of cells and tissues. The glycopeptide capture method significantly enriches in extracellular, secreted, and transmembrane proteins, these are the same proteins considered most easily accessible in the human body for diagnostic and therapeutic purposes.

TABLE 12
Predicted subcellular localizations
of proteins from human protein database
and their potential N-linked glycosylation

| | Total | NXT/S | % |
|---|---|---|---|
| All proteins in database | 40110 | 29908 | 75% |
| Extracellular/secreted/membrane proteins | 14041 | 10664 | 76% |
| Secreted proteins | 3947 | 3017 | 76% |
| Extracellular proteins | 3415 | 2358 | 69% |
| Transmembrane proteins | 6679 | 5289 | 79% |

[0241] Since analyses of serum proteins using SPEG focus on information-rich subproteomes, it should be pointed out that non-glycosylated proteins are transparent to this system. While it is believed that the majority of serum-specific proteins are glycosylated (Durand and Seta, Clin. Chem. 46:795-805 (2000)), intracellular proteins that are non-glycosylated may represent a rich source of biomarkers in the dead cells of diseased tissue. The data suggest that cell-specific surface proteins that are mostly glycosylated are also released into serum and are therefore identifiable using the glycopeptide capture method.

[0242] Validation of the experimentally identified or computational predicted glycopeptides by synthetic peptide standard. Peptide identification using tandem mass spectrometry is based on the matching of experimentally determined CID spectra with theoretical spectra generated from all possible peptide sequences from a protein database. Therefore, the peptide sequence assignments using database search algorithms include a certain degree of error, and in this study, statistical methods were used to objectively estimate the probability of an identified peptide being a correct peptide (Keller et al., Anal. Chem. 74:5383-5392 (2002)). An identified peptide with a peptide probability of 0.9 indicates that this peptide has a 90% chance to be correct. Using medium probability score cut-off, 3244 unique glycosylation sites were identified. Of these peptides, it is estimated that 2502 unique N-linked glycopeptides are predicted to be correct identifications.

[0243] The identified peptides were validated with additional evidence. Since MS/MS spectra from the same peptide sequence are highly reproducible (Rush et al., Nat. Biotechnol. 23:94-101 (2005)), a heavy isotope labeled peptide corresponding to the identified peptide of interest was synthesized. The MS/MS spectrum of the synthetic peptide was then compared with the one that was used to make the sequence assignment. The heavy isotope labeled peptide versus regular peptide was synthesized, which allowed differentiation of the synthetic standard from its native form by mass spectrometry and could be used to quantify the same peptide from biological sample using the high throughput platform we developed recently (Pan et al., Mol. Cell. Proteomics 4:182-190 (2005)).

[0244] One of the identified N-linked glycopeptides from plasma serine protease inhibitor shown in FIG. 19 was synthesized and the phenylalanine residue was replaced with heavy Phenylalanine (using ¹³C) in the peptide sequence. This heavy isotope labeled peptide standard produces 9 mass unit difference from the native peptide. The signature of the CID spectra of the native light and synthetic heavy forms of the peptide were highly reproducible, and the correctness of the sequence assignment of this peptide can be determined by 1) the co-elution of this heavy isotope labeled peptide with its light form of native peptide and 2) the similarity of the CID spectra (FIG. 20).

[0245] In the present study, a list of a large number of serum proteins and their N-linked glycopeptides from serum were identified using SPEG followed by MS/MS. The list of identified proteins confirmed the presence of a number of candidate marker proteins in plasma and serum, indicating that the quantitative analysis of serum proteins using SPEG increases the sensitivity and has the potential to identify disease markers. The increased sensitivity is achieved by focusing on only N-linked glycopeptides versus all tryptic peptides from whole proteins and avoiding the analysis of highly abundance proteins such as albumin.

[0246] As demonstrated in our recent publication (Pan et al., Mol. Cell. Proteomics 4:182-190 (2005)), this list of glycopeptides can be synthesized as a heavy isotope labeled standard and used to identify and quantify native glycopeptides using the recently developed mass spectrometry-based screening technology. This allows specific targeting of certain peptides/proteins with biological significance in a complex sample for identification and quantification. For each candidate marker, the identified formerly N-linked glycopeptide was chemically synthesized, labeled with at least one heavy isotope amino acid, and spiked into peptides isolated from serum using SPEG. During MS analysis, this representative stable isotope labeled peptide standard distinguishes itself from the corresponding native peptide by a mass difference corresponding to the stable isotope label. Knowing the exact mass, sequence and quantity of the standard peptide, the peptide standard and its isotopic pair isolated from serum can be located and selectively sequenced for identification. The quantification of the native peptide is determined by the ratio of the abundance of the spiked peptide, whose identify and quantity are known, to that of the native peptide (Pan et al., Mol. Cell. Proteomics 4:182-190 (2005)). Since this approach transforms proteomic analysis from traditional data dependant discovery phase to validation scoring phase and directly focusing on interesting peptides/proteins for identification and quantification, it technically increases the sample loading capacity, avoids some difficult issues associated with sample complexity and thus significantly improves the throughput and sensitivity.

[0247] Using the identified N-linked glycosylation sites from this study, further refinement was performed on the N-linked glycosylation motif by identifying amino acid preference around the glycosylation sites that are likely to be identified by mass spectrometry. It was found that amino acid positions −3 to +5 showed a significant bias for non-charged amino acids and against charged amino acids (K, R, D, E), as well as proline, tryptophan, and cysteine. The amino acid sequence before the glycosylated Asparagine (−3, −2, and −1) had preference for bulky hydrophobic amino acid (Y, F, M), and amino acid sequence after the glycosylated Asparagine (+1 to +5) had preference for small non-charged amino acids such as V, L, I, S and A. These amino acid preferences are in general agreement with the previous studies with the exception that the K, and R are less preferred around the NXT/S sequon (Petrescu et al., Glycobiology 14:103-114 (2004); Apweiler et al., Biochim Biophys Acta 1473:4-8 (1999)). The less represented K and R might be due to less efficient cleavage of tryptic digest around the N-linked glycosylation sites.

[0248] The selected amino acid preference around N-linked glycosylation site and the physico-chemical properties of the identified peptides by mass spectrometry in this study allow us to predict proteotypical N-linked glycopeptides from proteins exposed to extracellular environment that likely to be detected by mass spectrometry. A software tool, UniPep, has developed to output the known and unknown proteotypical N-linked glycopeptides from queried proteins in database. Theoretically, the experimentally identified or computationally determined proteotypic N-linked glycopeptides for quantitative analysis of serum proteins will capture majority of proteins designated to extracellular environment, which is likely to be detected in serum as disease biomarkers.

[0249] Throughout this application various publications have been referenced. The disclosures of these publications in their entireties are hereby incorporated by reference in this application in order to more fully describe the state of the art to which this invention pertains. Although the invention has been described with reference to the examples provided above, it should be understood that various modifications can be made without departing from the spirit of the invention.

The application's sequence listing, which the Patent Office published only in electronic form, follows.

SEQUENCE LISTING (3602 sequences)

SEQ ID NO: 1 - protein, 22 aa, Homo sapiens
REFVMQVKVGNHTAEGTGTNKK

SEQ ID NO: 2 - protein, 23 aa, Homo sapiens
YRPENSVANDTGFTVVAPGKEKA

SEQ ID NO: 3 - protein, 19 aa, Homo sapiens
MSDEVGCVNVTLCEGPNKF

SEQ ID NO: 4 - protein, 29 aa, Homo sapiens
RLASPPSQGEVPPGPLPEAVLALYNSTRD

SEQ ID NO: 5 - protein, 25 aa, Homo sapiens
KQFSLNWTYQECNNCSEEMFLQFRM

SEQ ID NO: 6 - protein, 20 aa, Homo sapiens
RNLSFLDLCFTTSIIPQMLV

SEQ ID NO: 7 - protein, 19 aa, Homo sapiens
KYEFCPFHNVTQHEQTFRW

SEQ ID NO: 8 - protein, 23 aa, Homo sapiens
RSEVELEVLGDTEGLNLSFTAIC

SEQ ID NO: 9 - protein, 15 aa, Homo sapiens
RNSSSSGSSGAGQKR

SEQ ID NO: 10 - protein, 17 aa, Homo sapiens
MGAAVTLKNLTGLNQRR

SEQ ID NO: 11 - protein, 26 aa, Homo sapiens
RAMLAAIYNTTELVMMQDSSPDFEDT

SEQ ID NO: 12 - protein, 32 aa, Homo sapiens
ERLASSNSSQSLAPLMMEVPMLSSLGVTNSKS

SEQ ID NO: 13 - protein, 16 aa, Homo sapiens
RKMAANSSGQGFQNKN

SEQ ID NO: 14 - protein, 28 aa, Homo sapiens
LMQNQSSTNHPGASIALSRPSLNKDFRD

SEQ ID NO: 15 - protein, 31 aa, Homo sapiens
LDTCPSSSTASSISSSGGSSGSSSDNRTYRY

SEQ ID NO: 16 - protein, 14 aa, Homo sapiens
QRNAENTKSNVTHK

SEQ ID NO: 17 - protein, 23 aa, Homo sapiens
KNNYGLLLNENESLFLMVVLWKI

SEQ ID NO: 18 - protein, 18 aa, Homo sapiens
KVFDSLLNLSSTLQATRA

SEQ ID NO: 19 - protein, 11 aa, Homo sapiens
INSTLKGRWRV

SEQ ID NO: 20 - protein, 22 aa, Homo sapiens
RAQPLINLQMVNASLYEHVERM

SEQ ID NO: 21 - protein, 23 aa, Homo sapiens
RNNISKLTDGAFWGLSKMHVLHL

SEQ ID NO: 22 - protein, 20 aa, Homo sapiens
KGIDIIIEMLANVNLSKDLS

SEQ ID NO: 23 - protein, 11 aa, Homo sapiens
SMISNMNASRA

SEQ ID NO: 24 - protein, 29 aa, Homo sapiens
MKKDAEEDDSLANSSDLLKELLETGDNRE

SEQ ID NO: 25 - protein, 23 aa, Homo sapiens
RANASFTWVASDGWGAQESIIKG

SEQ ID NO: 26 - protein, 25 aa, Homo sapiens
RNVNFSGIAGNPVTFNENGDAPGRY

SEQ ID NO: 27 - protein, 19 aa, Homo sapiens
RENALNNLDPNTELNVSRL

SEQ ID NO: 28 - protein, 10 aa, Homo sapiens
RKDINTTAQN

SEQ ID NO: 29 - protein, 18 aa, Homo sapiens
RLSALDNLLNHSSMFLKG

SEQ ID NO: 30 - protein, 11 aa, Homo sapiens
KVINETWAWKN

SEQ ID NO: 31 - protein, 22 aa, Homo sapiens
MVDKYIPNISMCLKDSDPFIRK

SEQ ID NO: 32 - protein, 30 aa, Homo sapiens
KRGRGNFGGQSEQENTLNQLLVEMDGFNTT

SEQ ID NO: 33 - protein, 21 aa, Homo sapiens
LTSLSVTNTNLSTVPFLAFKH

SEQ ID NO: 34 - protein, 13 aa, Homo sapiens
RVLNVSQNLLETL

SEQ ID NO: 35 - protein, 17 aa, Homo sapiens
KLVPLGVFTGLSNLTKL

SEQ ID NO: 36 - protein, 22 aa, Homo sapiens
SYQPWGNVPDANYTSDEEEEKQ

SEQ ID NO: 37 - protein, 9 aa, Homo sapiens
SEENSTFRN

SEQ ID NO: 38 - protein, 33 aa, Homo sapiens
KLFKEVASLQENFEVFLSFEDYSNSSLVADLRE

SEQ ID NO: 39 - protein, 19 aa, Homo sapiens
GFVNSTMEEAGLCGLREKA

SEQ ID NO: 40 - protein, 24 aa, Homo sapiens
ENAPNGTLVVTVNATDLDEGVNKD

SEQ ID NO: 41 - protein, 13 aa, Homo sapiens
KEKGNSTTDNSDQ

SEQ ID NO: 42 - protein, 23 aa, Homo sapiens
ASSFKGYIENCSTPNTYICMQRT

SEQ ID NO: 43 - protein, 31 aa, Homo sapiens
KKAADTAVGWALGYMLNLTNLIPADPPGLRK

SEQ ID NO: 44 - protein, 24 aa, Homo sapiens
RVSVNTANVTLGPQLMEVTVYRRH

SEQ ID NO: 45 - protein, 21 aa, Homo sapiens
KNDRNSSDETFLKDLPIMFDV

SEQ ID NO: 46 - protein, 35 aa, Homo sapiens
KNGGSILFYTGNEGDIIWFCNNTGFMWDVAEELKA

SEQ ID NO: 47 - protein, 32 aa, Homo sapiens
YKPLNDSVRAQYSNWLLAGNLALSPTGNAKKP

SEQ ID NO: 48 - protein, 17 aa, Homo sapiens
KKMNMMNRSYNVTLKRQ

SEQ ID NO: 49 - protein, 16 aa, Homo sapiens
KGRMSTLTFFNVSEKD

SEQ ID NO: 50 - protein, 17 aa, Homo sapiens
KKSLELNPNNSTAMLRK

SEQ ID NO: 51 - protein, 30 aa, Homo sapiens
KINSTADLDFIQQAISYSSFPFWMGLSRRN

SEQ ID NO: 52 - protein, 24 aa, Homo sapiens
RGSDDGDGESFNGSPTGSINLSLD

SEQ ID NO: 53 - protein, 15 aa, Homo sapiens
RETVPEYNLSITARD

SEQ ID NO: 54 - protein, 26 aa, Homo sapiens
KGTVLPVATIQNASTAMLMAASVARK

SEQ ID NO: 55 - protein, 19 aa, Homo sapiens
KTLEELHLTGNLSAENNRY

SEQ ID NO: 56 - protein, 27 aa, Homo sapiens
MTVKVDGVAQDGTTMYIHNKVHNRTRT

SEQ ID NO: 57 - protein, 14 aa, Homo sapiens
RKFSFYGNLSPRRS

SEQ ID NO: 58 - protein, 24 aa, Homo sapiens
KSCSSHSSSNTLSSNTSSNSDDKH

SEQ ID NO: 59 - protein, 32 aa, Homo sapiens
KNWSALLTAVVIILTIAGNILVIMAVSLEKKL

SEQ ID NO: 60 - protein, 25 aa, Homo sapiens
KFLMSNETVLLAKHNIFTLALMIVN

SEQ ID NO: 61 - protein, 27 aa, Homo sapiens
RRGDNDSHQGDLEPILEASVLSSHHKK

SEQ ID NO: 62 - protein, 23 aa, Homo sapiens
KLRKEQLKEELNENQSTPKKEKQ

SEQ ID NO: 63 - protein, 19 aa, Homo sapiens
RVPPTLNSSPCGGFTLCKA

SEQ ID NO: 64 - protein, 30 aa, Homo sapiens
RKKVTAQNLSDGDIKLLVNIVRAYDIPVRK

SEQ ID NO: 65 - protein, 25 aa, Homo sapiens
RETPPLEDLAANQSEDPRNQRLSKN

SEQ ID NO: 66 - protein, 25 aa, Homo sapiens
KNGRYQPSIPPHAAVAANQSRARRG

SEQ ID NO: 67 - protein, 14 aa, Homo sapiens
KCGSAYEPENQSKD

SEQ ID NO: 68 - protein, 30 aa, Homo sapiens
KEEFVIHTIFPPNGMNLYKNNHSESSSNRS

SEQ ID NO: 69 - protein, 27 aa, Homo sapiens
MNSEFNLSLLAPCLSLGMSEISGGQKS

SEQ ID NO: 70 - protein, 30 aa, Homo sapiens
RAFDMLSECGFHMVACNSSVTASFINQYTD

SEQ ID NO: 71 - protein, 17 aa, Homo sapiens
MSTLSNFTQTLEDVFRR

SEQ ID NO: 72 - protein, 38 aa, Homo sapiens
KTNLDDDVPILLFESNGSLIYTPTIEINSSHHSAMEKR

SEQ ID NO: 73 - protein, 14 aa, Homo sapiens
ANASGYMYETSYRR

SEQ ID NO: 74 - protein, 16 aa, Homo sapiens
KAFNSTLPTMAQMEKA

SEQ ID NO: 75 - protein, 25 aa, Homo sapiens
RLFCDPTFLPENDSLFYNRLLPGKV

SEQ ID NO: 76 - protein, 17 aa, Homo sapiens
KYEIYLNSSLVQFLLSR

SEQ ID NO: 77 - protein, 35 aa, Homo sapiens
KRNHMLLLYPREILILDLEVNQTVGVIAIERTGVP

SEQ ID NO: 78 - protein, 34 aa, Homo sapiens
KLLKGDIDIGSQNGTDLFGFGNTHEYPDLQMILS

SEQ ID NO: 79 - protein, 28 aa, Homo sapiens
NGPDTNHQNPQNKTSPFSVSPTGPSTKI

SEQ ID NO: 80 - protein, 38 aa, Homo sapiens
KAQHEFTEFVGATMFGTYNVISLVVLLNMLIAMMNNSY

SEQ ID NO: 81 - protein, 26 aa, Homo sapiens
KTNRTNKPSTPTTATRKKKDLKNFRN

SEQ ID NO: 82 - protein, 24 aa, Homo sapiens
RNVDSNLANLIMNEIVDNGTAVKF

SEQ ID NO: 83 - protein, 23 aa, Homo sapiens
KMYSEGSDIVPQSNETALHYFKK

SEQ ID NO: 84 - protein, 34 aa, Homo sapiens
MNQFGPSALINLSNFSSIKPEPASTPPQGSMANS

SEQ ID NO: 85 - protein, 22 aa, Homo sapiens
FKNFVITYNRTYESKEEARWRL

SEQ ID NO: 86 - protein, 38 aa, Homo sapiens
HSFLVHLIGLLVWQCDISVSPVAAIVTDIFNTSDGGRF

SEQ ID NO: 87 - protein, 26 aa, Homo sapiens
KNPELSGSLMTLSNVSCLSNTPARKI

SEQ ID NO: 88 - protein, 16 aa, Homo sapiens
PDNASGCGEQINYGRV

SEQ ID NO: 89 - protein, 20 aa, Homo sapiens
RDVNICNMTSHLPAAASASP

SEQ ID NO: 90 - protein, 30 aa, Homo sapiens
RRLSLSQSITDDDLEAIANDSEEEIIKPRS

SEQ ID NO: 91 - protein, 27 aa, Homo sapiens
KTSKSEENSAGIPEDNGSQRIEDTQKL

SEQ ID NO: 92 - protein, 33 aa, Homo sapiens
KSDSSKSESDSSDSDSKSDSSDSNSSDSSDNSD

SEQ ID NO: 93 - protein, 35 aa, Homo sapiens
RDLAELKSSLVNESEGAAGSAGIPGVPGAGAGARG

SEQ ID NO: 94 - protein, 14 aa, Homo sapiens
KHIPGLIHNMTARC

SEQ ID NO: 95 - protein, 16 aa, Homo sapiens
RKVHLMGYNCNATTKC

SEQ ID NO: 96 - protein, 22 aa, Homo sapiens
KSIEQSIEQEEGLNRSSADLRI

SEQ ID NO: 97 - protein, 25 aa, Homo sapiens
RNLSVDGKNVDMAGFIANNGTREGC

SEQ ID NO: 98 - protein, 21 aa, Homo sapiens
RFSSFVPVTIPHATTANTSVL

SEQ ID NO: 99 - protein, 20 aa, Homo sapiens
KCEFLANLHITALLNVSRRT

SEQ ID NO: 100 - protein, 26 aa, Homo sapiens
KDIDVSPKHVGFATIPRNYTMSFLPR

SEQ ID NO: 101 - protein, 18 aa, Homo sapiens
KAKSDQLLSSNENFTNKV

SEQ ID NO: 102 - protein, 15 aa, Homo sapiens
KNISLTKQIDQLSKD

SEQ ID NO: 103 - protein, 20 aa, Homo sapiens
KLMSLANSSEGKVDKVLMRN

SEQ ID NO: 104 - protein, 15 aa, Homo sapiens
KTEPMDADDSNNCTG

SEQ ID NO: 105 - protein, 20 aa, Homo sapiens
KNGSGAVFPVAGADVQTLRE

SEQ ID NO: 106 - protein, 36 aa, Homo sapiens
KKPYVSLAQQMAPPSPSNSTPNSSSGSNGNDQLSKT

SEQ ID NO: 107 - protein, 37 aa, Homo sapiens
RDAGGELANLSQAELVDLVQWTDLILFDYLTANFDRL

SEQ ID NO: 108 - protein, 28 aa, Homo sapiens
RDHGSPTLSANVSLRVLVGDRNDNAPRV

SEQ ID NO: 109 - protein, 16 aa, Homo sapiens
KNYHQPAILNSSALRQ

SEQ ID NO: 110 - protein, 15 aa, Homo sapiens
TNCTTEASMAIRPKT

SEQ ID NO: 111 - protein, 28 aa, Homo sapiens
KVLKNSSLAEFVQSLSQTMGFPQDQIRL

SEQ ID NO: 112 - protein, 14 aa, Homo sapiens
TNQTPPTYNKTNKF

SEQ ID NO: 113 - protein, 19 aa, Homo sapiens
RIDDLQMVLNQTEDHRQRV

SEQ ID NO: 114 - protein, 32 aa, Homo sapiens
KMPGDIKNWVDAHMNCEDIAMNFLVANVTGKA

SEQ ID NO: 115 - protein, 15 aa, Homo sapiens
KCTNLSEGVLSVRKR

SEQ ID NO: 116 - protein, 22 aa, Homo sapiens
KSPDTFMIPMALPNDNGSVSGV

SEQ ID NO: 117 - protein, 19 aa, Homo sapiens
KMSLVMPAMAPNETLSGRG

SEQ ID NO: 118 - protein, 26 aa, Homo sapiens
RYDGAVQVMATQDGANFTAARQGYRR

SEQ ID NO: 119 - protein, 19 aa, Homo sapiens
KTNQGIPELNASSVGMAKA

SEQ ID NO: 120 - protein, 21 aa, Homo sapiens
RCSAEEATEGLMNLSPSAMKN

SEQ ID NO: 121 - protein, 26 aa, Homo sapiens
SLPSWKSLLNVPMEDVNLSSGHIARV

SEQ ID NO: 122 - protein, 27 aa, Homo sapiens
MAHSQNSLELPININATQITTAYGHRA

SEQ ID NO: 123 - protein, 15 aa, Homo sapiens
KENNTGYINASHIKV

SEQ ID NO: 124 - protein, 26 aa, Homo sapiens
EFKNNFLNIDPITMAYSLNSSAQERL

SEQ ID NO: 125 - protein, 32 aa, Homo sapiens
RECTCPPGMFQSNATCAPHTVCPVGWGVRKKG

SEQ ID NO: 126 - protein, 10 aa, Homo sapiens
LKSNNSMAQA

SEQ ID NO: 127 - protein, 21 aa, Homo sapiens
RIQMLSFAGEPLPQNSSMARG

SEQ ID NO: 128 - protein, 37 aa, Homo sapiens
RKEEEPSSSSVFNQNDPWAPTVDFSDFINNETIAGKD

SEQ ID NO: 129 - protein, 32 aa, Homo sapiens
RGGLNLTAVTVAAENNHTVAFLGTSDGRILKV

SEQ ID NO: 130 - protein, 24 aa, Homo sapiens
REAESLQPMTVVGTDYVFHNDTKV

SEQ ID NO: 131 - protein, 23 aa, Homo sapiens
RSFASGGRSINVTGQGFSLIQRF

SEQ ID NO: 132 - protein, 24 aa, Homo sapiens
KEHAVFTSNQEEQDPANHTCGVKS

SEQ ID NO: 133 - protein, 13 aa, Homo sapiens
FGLFNTTSNIFRG

SEQ ID NO: 134 - protein, 29 aa, Homo sapiens
MFMVKNGNGTACIMANFSAAFSVNYDTKS

SEQ ID NO: 135 - protein, 12 aa, Homo sapiens
RGHTLTLNFTRN

SEQ ID NO: 136 - protein, 15 aa, Homo sapiens
KGVSFNESAADNLKL

SEQ ID NO: 137 - protein, 18 aa, Homo sapiens
RIDWDDDKYYNTSLETRL

SEQ ID NO: 138 - protein, 19 aa, Homo sapiens
KFCDNSSAIQGKEVRFLRP

SEQ ID NO: 139 - protein, 16 aa, Homo sapiens
MSNYSSSSLLSGAGKD

SEQ ID NO: 140 - protein, 14 aa, Homo sapiens
TKNVNPNWSVNVKT

SEQ ID NO: 141 - protein, 30 aa, Homo sapiens
KIKKHFNTGPKPNSTAAGVSVIATTALDKE

SEQ ID NO: 142 - protein, 17 aa, Homo sapiens
MALNNVSLSSGDQRSRV

SEQ ID NO: 143 - protein, 28 aa, Homo sapiens
RANLTNFPENGTFVVNIAQLSQDDSGRY

SEQ ID NO: 144 - protein, 16 aa, Homo sapiens
KVPGNVTAVLGETLKV

SEQ ID NO: 145 - protein, 24 aa, Homo sapiens
RLSLLEEPGNGTFTVILNQLTSRD

SEQ ID NO: 146 - protein, 20 aa, Homo sapiens
KWNNTGCQALPSQDEGPSKA

SEQ ID NO: 147 - protein, 26 aa, Homo sapiens
MPVSSSSPLSSLTFNAINRYTNTSKT

SEQ ID NO: 148 - protein, 11 aa, Homo sapiens
REQQFNSTFRV

SEQ ID NO: 149 - protein, 11 aa, Homo sapiens
REEQFNSTYRV

SEQ ID NO: 150 - protein, 12 aa, Homo sapiens
WSESGQNVTARN

SEQ ID NO: 151 - protein, 11 aa, Homo sapiens
KTPLTANITKS

SEQ ID NO: 152 - protein, 27 aa, Homo sapiens
KHYTNPSQDVTVPCPVPPPPPCCHPRL

SEQ ID NO: 153 - protein, 29 aa, Homo sapiens
RLSLHRPALEDLLLGSEANLTCTLTGLRD

SEQ ID NO: 154 - protein, 23 aa, Homo sapiens
RLAGKPTHVNVSVVMAEVDGTCY

SEQ ID NO: 155 - protein, 27 aa, Homo sapiens
RIAENYTAVVSPDIASIDLNTFEFNKP

SEQ ID NO: 156 - protein, 19 aa, Homo sapiens
KKNADNNSSAFTALSEERD

SEQ ID NO: 157 - protein, 28 aa, Homo sapiens
KSVVEKMKNISNHLVIEANLDGELNLKI

SEQ ID NO: 158 - protein, 26 aa, Homo sapiens
KVSPRGIILTDNLTNQLIENVSIYRI

SEQ ID NO: 159 - protein, 21 aa, Homo sapiens
KAPLSTVSANTTNMDEVPRPQ

SEQ ID NO: 160 - protein, 16 aa, Homo sapiens
TANSQVMGSANSTLRA

SEQ ID NO: 161 - protein, 16 aa, Homo sapiens
RYNVSQQALDLQNLRF

SEQ ID NO: 162 - protein, 17 aa, Homo sapiens
RIDGSQNFNETWENYKY

SEQ ID NO: 163 - protein, 16 aa, Homo sapiens
KNEEVKNMSLELNSKL

SEQ ID NO: 164 - protein, 26 aa, Homo sapiens
CFYNLELGDMSLSDNASMCLMSIIKK

SEQ ID NO: 165 - protein, 22 aa, Homo sapiens
RDGVLLCQLLHNLSPGSIDLKD

SEQ ID NO: 166 - protein, 15 aa, Homo sapiens
KTNVTHEEHTAVEKI

SEQ ID NO: 167 - protein, 12 aa, Homo sapiens
IWEKANLTLPRG

SEQ ID NO: 168 - protein, 30 aa, Homo sapiens
KVNKTLTSLNIESNFITGTGILALVEALKE

SEQ ID NO: 169 - protein, 20 aa, Homo sapiens
KKNITYYDSMGGINNEACRI

SEQ ID NO: 170 - protein, 27 aa, Homo sapiens
KDGYDLVQELCPGFFFGNVSLCCDVRQ

SEQ ID NO: 171 - protein, 19 aa, Homo sapiens
RRQAVELNVVAIVNDTVGT

SEQ ID NO: 172 - protein, 23 aa, Homo sapiens
RRQGAYNIDVVAVVNDTVGTMMG

SEQ ID NO: 173 - protein, 18 aa, Homo sapiens
KLNVSDLYKLTDTVAIRE

SEQ ID NO: 174 - protein, 18 aa, Homo sapiens
SVGAAPNASDGLAHSGKV

SEQ ID NO: 175 - protein, 25 aa, Homo sapiens
KYEYLMTLHGVVNESTVCLMGHERR

SEQ ID NO: 176 - protein, 31 aa, Homo sapiens
KANGLLDFDIFYNVTGCLRNMSSAGADGRKA

SEQ ID NO: 177 - protein, 23 aa, Homo sapiens
MMSVQANTGPPWESKNSTAVWRG

SEQ ID NO: 178 - protein, 18 aa, Homo sapiens
RVLYLAAYNCTLRPVSKK

SEQ ID NO: 179 - protein, 18 aa, Homo sapiens
RGCNDSDVLAVAGFALRD

SEQ ID NO: 180 - protein, 19 aa, Homo sapiens
KGPGEVIPGGNHSLYSLKG

SEQ ID NO: 181 - protein, 26 aa, Homo sapiens
KEFYLTPNSPAEMLHNVTLALELLKD

SEQ ID NO: 182 - protein, 27 aa, Homo sapiens
KNWTFGPQDVDELIFMLSDSPGVMCRP

SEQ ID NO: 183 - protein, 29 aa, Homo sapiens
KEDGSGSAYDKESMAIIKLNNTTVLYLKE

SEQ ID NO: 184 - protein, 24 aa, Homo sapiens
TILLDAHEAGSAENDTADAEPPKI

SEQ ID NO: 185 - protein, 18 aa, Homo sapiens
RLQNSQCYNWTLLLGNRW

SEQ ID NO: 186 - protein, 12 aa, Homo sapiens
QNSSQSADGLRC

SEQ ID NO: 187 - protein, 16 aa, Homo sapiens
RLAMAYGLNVSFLERL

SEQ ID NO: 188 - protein, 17 aa, Homo sapiens
REFSAGTVYPETNKTKN

SEQ ID NO: 189 - protein, 28 aa, Homo sapiens
KHWTNFVITENANDAIGILNNSASFNKM

SEQ ID NO: 190 - protein, 29 aa, Homo sapiens
KALWNLRSNDTGLLGNVVNIQTGHWVGKQ

SEQ ID NO: 191 - protein, 23 aa, Homo sapiens
MGNSSEFQKAVKLVINTVSFDKD

SEQ ID NO: 192 - protein, 23 aa, Homo sapiens
KKTLDEERNSSSRSGITGTTNKK

SEQ ID NO: 193 - protein, 17 aa, Homo sapiens
ALCDQEGWDTPINYSKT

SEQ ID NO: 194 - protein, 20 aa, Homo sapiens
KGAEIEVDENGTLDLSMKKN

SEQ ID NO: 195 - protein, 26 aa, Homo sapiens
MTGVADNGSVLEITPDVAEVYLVRKN

SEQ ID NO: 196 - protein, 18 aa, Homo sapiens
KELLNETEEEINKALNKK

SEQ ID NO: 197 - protein, 18 aa, Homo sapiens
KQMNMSPPPGNAGPVIMS

SEQ ID NO: 198 - protein, 21 aa, Homo sapiens
MLAQEGMLANLVEQNISVRRR

SEQ ID NO: 199 - protein, 15 aa, Homo sapiens
KSLNVSSSVNQASRL

SEQ ID NO: 200 - protein, 29 aa, Homo sapiens
GFDEDMVIQALQKTNNRSIEAAIEFISKM

SEQ ID NO: 201 - protein, 29 aa, Homo sapiens
RREQMAAAAARPINASMKPGNVQQSVNRK

SEQ ID NO: 202 - protein, 38 aa, Homo sapiens
RQPPPPYPLTAANGQSPSALQTGGSAAPSSYTNGSIPQ

SEQ ID NO: 203 - protein, 16 aa, Homo sapiens
KNLSCTNVLQSNSTKK

SEQ ID NO: 204 - protein, 17 aa, Homo sapiens
RMKSDSFLQEMPNVTNI

SEQ ID NO: 205 - protein, 15 aa, Homo sapiens
RNCQAIQQNHSCSKS

SEQ ID NO: 206 - protein, 30 aa, Homo sapiens
RLPLANMSYYVSPQAVDAVHRGLGLPLPRT

SEQ ID NO: 207 - protein, 19 aa, Homo sapiens
RALSMYEEAFQNTSDSDRY

SEQ ID NO: 208 - protein, 34 aa, Homo sapiens
KITNEKGECIVSDFTIGRKGYGSIYFEGDVNLTN

SEQ ID NO: 209 - protein, 36 aa, Homo sapiens
MRPRGQPADIRQQPGMMPHGQLTTINQSQLSAQLGL

SEQ ID NO: 210 - protein, 23 aa, Homo sapiens
QKFNDSEGDDTEETEDYRQFRKS

SEQ ID NO: 211 - protein, 26 aa, Homo sapiens
KVVNPQEYSSNCTEPFPNSTNLLPTE

SEQ ID NO: 212 - protein, 17 aa, Homo sapiens
SLNGTSRGSSDLTSARN

SEQ ID NO: 213 - protein, 14 aa, Homo sapiens
KLQTTNTTRSVLKD

SEQ ID NO: 214 - protein, 17 aa, Homo sapiens
QPQAVPPYASENQTCRD

SEQ ID NO: 215 - protein, 24 aa, Homo sapiens
KVTQNLTLIEESLTSEFIHDIDRE

SEQ ID NO: 216 - protein, 15 aa, Homo sapiens
RLQNNENNISCVERG

SEQ ID NO: 217 - protein, 21 aa, Homo sapiens
KCPGPTSGPSPGTNLSGCIRM

SEQ ID NO: 218 - protein, 18 aa, Homo sapiens
KNIFVNGTTGEGLSLSVS

SEQ ID NO: 219 - protein, 13 aa, Homo sapiens
KGVVVNSSVMVKF

SEQ ID NO: 220 - protein, 28 aa, Homo sapiens
KGHFIYKNVSEDLPLPTFSPTLLGDSRM

SEQ ID NO: 221 - protein, 34 aa, Homo sapiens
KTVSNLTESSSESIQSFLQSMITAVGIPEVMSRL

SEQ ID NO: 222 - protein, 21 aa, Homo sapiens
RNLAMEATYINHNFSQQCLRM

SEQ ID NO: 223 - protein, 15 aa, Homo sapiens
KNNYSPTAAGTERRK

SEQ ID NO: 224 - protein, 17 aa, Homo sapiens
RVESNSSAHPWGLVGKS

SEQ ID NO: 225 - protein, 20 aa, Homo sapiens
YPDPQSANHMNSSLLSLYRK

SEQ ID NO: 226 - protein, 19 aa, Homo sapiens
MQINTNKSKDASTSPPNRE

SEQ ID NO: 227 - protein, 18 aa, Homo sapiens
MNDQDLPNWSNENVDDRL

SEQ ID NO: 228 - protein, 40 aa, Homo sapiens
RGRGASPRGGGPLILLDLNDENSNQSFHSEGSLPKGTEPS

SEQ ID NO: 229 - protein, 19 aa, Homo sapiens
RSFCKDQQGDHNGENSSKC

SEQ ID NO: 230 - protein, 15 aa, Homo sapiens
RIVAARLNGSLDFFS

SEQ ID NO: 231 - protein, 35 aa, Homo sapiens
KESYLQIPSAKVRPQTNITLQIATDEDSGILLYKG

SEQ ID NO: 232 - protein, 14 aa, Homo sapiens
RNTTLFIDQVEAKW

SEQ ID NO: 233 - protein, 27 aa, Homo sapiens
KSSRMETVGNASSSSNPSSPGRIKGRL

SEQ ID NO: 234 - protein, 26 aa, Homo sapiens
AAEGGNTSDTQSSSSVNIVMGPSARA

SEQ ID NO: 235 - protein, 33 aa, Homo sapiens
KRYNGSDPASGPSVQDKYVTALYFTFSSLTSVG

SEQ ID NO: 236 - protein, 29 aa, Homo sapiens
REQFCPPPPQIPNAQNMTTTVNYQDGEKV

SEQ ID NO: 237 - protein, 27 aa, Homo sapiens
KFNLTEDMYAQDSIELLTTSGIQFKKH

SEQ ID NO: 238 - protein, 11 aa, Homo sapiens
ATNETNVNIPQ

SEQ ID NO: 239 - protein, 12 aa, Homo sapiens
RFINSTFLEQKE

SEQ ID NO: 240 - protein, 15 aa, Homo sapiens
RCIQANYSLMENGKI

SEQ ID NO: 241 - protein, 24 aa, Homo sapiens
RADGTVNQIEGEATPVNLTEPAKL

SEQ ID NO: 242 - protein, 29 aa, Homo sapiens
RKTFPTVNPSTGEVICQVAEGDKEDVDKA

SEQ ID NO: 243 - protein, 24 aa, Homo sapiens
KNGDPELNVIQNYNEGIIDNLSKD

SEQ ID NO: 244 - protein, 37 aa, Homo sapiens
RQSKSESDYSDGDNDSINSTSNSNDTINCSSESSSRD

SEQ ID NO: 245 - protein, 40 aa, Homo sapiens
RQNNTSLRLGVYAALGILQGFLVMLAAMAMAAGGIQAARV

SEQ ID NO: 246 - protein, 19 aa, Homo sapiens
KMDTELAESGSNFSVGQRQ

SEQ ID NO: 247 - protein, 23 aa, Homo sapiens
KLSELHDNQDGLVNMESLNSTRS

SEQ ID NO: 248 - protein, 13 aa, Homo sapiens
LQVEQQLANITVS

SEQ ID NO: 249 - protein, 26 aa, Homo sapiens
RKLQGNMLLNSSMEDKMLKENPEEKL

SEQ ID NO: 250 - protein, 21 aa, Homo sapiens
RDDALKNLSHTPVSKFVLDRI

SEQ ID NO: 251 - protein, 16 aa, Homo sapiens
RTKSQSKLDRNTSFRL

SEQ ID NO: 252 - protein, 26 aa, Homo sapiens
RGIEAALGTRASASSFLNMSRCCIRA

SEQ ID NO: 253 - protein, 34 aa, Homo sapiens
KTNEISVIQSGGVPTLPVSLGATSVVNNATVSKM

SEQ ID NO: 254 - protein, 20 aa, Homo sapiens
KEEENKSSSEGGDAGNDTRN

SEQ ID NO: 255 - protein, 29 aa, Homo sapiens
CYPDNPANRSLVLPWSFPLEWAPQNLTRW

SEQ ID NO: 256 - protein, 27 aa, Homo sapiens
MDGMNSSGVYASPTCSNMAHHALSFRG

SEQ ID NO: 257 - protein, 18 aa, Homo sapiens
REVTNKNGTNVFQEESRK

SEQ ID NO: 258 - protein, 28 aa, Homo sapiens
RTGLLKQTHIAPKPAAHLAAPANGSAPS

SEQ ID NO: 259 - protein, 33 aa, Homo sapiens
RARAGHTMNTSPGTVGSDPVILATAGYDHTVRF

SEQ ID NO: 260 - protein, 36 aa, Homo sapiens
KNNRSDMMSALGLGQEEDIESPWDSESISENFPQKY

SEQ ID NO: 261 - protein, 21 aa, Homo sapiens
KMNRTALHLACANGHPEVVTL

SEQ ID NO: 262 - protein, 10 aa, Homo sapiens
KETFFNLSKR

SEQ ID NO: 263 - protein, 18 aa, Homo sapiens
KLPYQGNATMLVVLMEKM

SEQ ID NO: 264 - protein, 12 aa, Homo sapiens
GSPPGFNNTERT

SEQ ID NO: 265 - protein, 23 aa, Homo sapiens
KVMVVLTDGGIFEDPLNLTTVIN

SEQ ID NO: 266 - protein, 37 aa, Homo sapiens
KYKSVYVGEETNITLNDLKPAMDYHAKVQAEYNSIKG

SEQ ID NO: 267 - protein, 23 aa, Homo sapiens
RVVGVPYQGNATALFILPSEGKM

SEQ ID NO: 268 - protein, 36 aa, Homo sapiens
KVLPSLGISNVFTSHADLSGISNHSNIQVSEMVHKA

SEQ ID NO: 269 - protein, 17 aa, Homo sapiens
REDQYHYLLDRNLSCRV

SEQ ID NO: 270 - protein, 22 aa, Homo sapiens
KEHETCLAPELYNGNYSTTQKT

SEQ ID NO: 271 - protein, 23 aa, Homo sapiens
KHGVIISSTVDTYENGSSVEYRC

SEQ ID NO: 272 - protein, 17 aa, Homo sapiens
RRNASGLTNGLSSQERP

SEQ ID NO: 273 - protein, 17 aa, Homo sapiens
RLNNITMWLNNSNPPVT

SEQ ID NO: 274 - protein, 24 aa, Homo sapiens
KQVLLFNNSHLTYVSFDFHEHCRG

SEQ ID NO: 275 - protein, 9 aa, Homo sapiens
LLLSNCSKA

SEQ ID NO: 276 - protein, 20 aa, Homo sapiens
MFFMNHQHSTAQLNLSNMKI

SEQ ID NO: 277 - protein, 35 aa, Homo sapiens
GRVPVNVTSTALLSVLDIFPTVVALAQASLPQGRR

SEQ ID NO: 278 - protein, 18 aa, Homo sapiens
GNNMSTPLPAIVPAARKA

SEQ ID NO: 279 - protein, 14 aa, Homo sapiens
KNGLSNSSILLDKC

SEQ ID NO: 280 - protein, 20 aa, Homo sapiens
KGNMTLSPENGYWVVIMMKE

SEQ ID NO: 281 - protein, 26 aa, Homo sapiens
RGFNMSIPMPGHPVNFSSVTLEQARR

SEQ ID NO: 282 - protein, 24 aa, Homo sapiens
RMKRGYDNPNFILSEVNETDDTKM

SEQ ID NO: 283 - protein, 18 aa, Homo sapiens
KRNETLVFSHNAVIAMRD

SEQ ID NO: 284 - protein, 28 aa, Homo sapiens
SLERFIHGGANVTGFQLVDFNTPMVTKL

SEQ ID NO: 285 - protein, 18 aa, Homo sapiens
SKKEHISAENMSLETLRN

SEQ ID NO: 286 - protein, 17 aa, Homo sapiens
RTALVANTSNMPVAARE

SEQ ID NO: 287 - protein, 17 aa, Homo sapiens
KNAVITVPAYFNDSQRQ

SEQ ID NO: 288 - protein, 23 aa, Homo sapiens
SFMNVSESHFVSALTVVFINSKS

SEQ ID NO: 289 - protein, 15 aa, Homo sapiens
KQPKVGFYSSLNQTH

SEQ ID NO: 290 - protein, 18 aa, Homo sapiens
KQINSSISGNLWDKDQRA

SEQ ID NO: 291 - protein, 27 aa, Homo sapiens
RLLNLSLNSEVVLDQDAIDVIIHVARN

SEQ ID NO: 292 - protein, 20 aa, Homo sapiens
KNNFNGSLVQASYQHEELRR

SEQ ID NO: 293 - protein, 26 aa, Homo sapiens
RNFNYHILSPCDLSNYTDLAMSTVKQ

SEQ ID NO: 294 - protein, 34 aa, Homo sapiens
MVVLEWLANPSNDMYADTVTTVILEVQSNPKIRK

SEQ ID NO: 295 - protein, 20 aa, Homo sapiens
TVAPQGQDMASIAPDNRSKS

SEQ ID NO: 296 - protein, 22 aa, Homo sapiens
RNPDMEVDENGTLDLSMNKQRP

SEQ ID NO: 297 - protein, 33 aa, Homo sapiens
CLIPNETKTPGVMDHYLVMHQLRCNGVLEGIRI

SEQ ID NO: 298 - protein, 22 aa, Homo sapiens
KYLINGVNANNTRVQDLFCSVG

SEQ ID NO: 299 - protein, 12 aa, Homo sapiens
RYHTESLQNMSK

SEQ ID NO: 300 - protein, 35 aa, Homo sapiens
MAILFNNMLSGQWTMTNTTNQYSSLMIMMAMAMKL

SEQ ID NO: 301 - protein, 19 aa, Homo sapiens
EEADVDMEPNVSVYSGLKE

SEQ ID NO: 302 - protein, 14 aa, Homo sapiens
AHNHHGENKTVLRK

SEQ ID NO: 303 - protein, 36 aa, Homo sapiens
KNKISIEDLLQSSMGSTQQAQNTTSSLMNLVMQFRK

SEQ ID NO: 304 - protein, 31 aa, Homo sapiens
RNMSQLMETGEVSDDLASQLIYQLVAELAKA

SEQ ID NO: 305 - protein, 30 aa, Homo sapiens
LFNGSLLLQNVSLENEGTYVCIATNALGKA

SEQ ID NO: 306 - protein, 32 aa, Homo sapiens
RDYKQTGDNLSSMLLENLTDNESENTNLKKKV

SEQ ID NO: 307 - protein, 16 aa, Homo sapiens
KINFENANLSALNLKI

SEQ ID NO: 308 - protein, 22 aa, Homo sapiens
RQDAVVAVTGDGVNDSPALKKA

SEQ ID NO: 309 - protein, 18 aa, Homo sapiens
KLLYNLRASLNKNQSSRH

SEQ ID NO: 310 - protein, 27 aa, Homo sapiens
KLPGLANTTLSTPNPDTQASASPDPRP

SEQ ID NO: 311 - protein, 23 aa, Homo sapiens
KKWRVENQENVSNLVIEDTELKQ

SEQ ID NO: 312 - protein, 23 aa, Homo sapiens
KTLDLQSGLKDITGNKSEMIEKP

SEQ ID NO: 313 - protein, 32 aa, Homo sapiens
YDLKEGLLVSPGSVIMNGSNMANTSPSVKSKE

SEQ ID NO: 314 - protein, 29 aa, Homo sapiens
KEASLADNNTDVRLIGEKLFHGVSMSERC

SEQ ID NO: 315 - protein, 20 aa, Homo sapiens
RLDKSNFQQPYITNRTFMLA

SEQ ID NO: 316 - protein, 25 aa, Homo sapiens
MAPQNLSTFCLLLLYLIGAVIAGRD

SEQ ID NO: 317 - protein, 23 aa, Homo sapiens
KMLMGINVTPIAALLYTPVLIRF

SEQ ID NO: 318 - protein, 17 aa, Homo sapiens
RLNPTVTYGNDSFSAKA

SEQ ID NO: 319 - protein, 11 aa, Homo sapiens
RANLTVVLLRG

SEQ ID NO: 320 - protein, 19 aa, Homo sapiens
GIDTTSLHSHNGSPLTSKN

SEQ ID NO: 321 - protein, 30 aa, Homo sapiens
KIIGNSVGALGNLTIILAIIVFVFALVGKQ

SEQ ID NO: 322 - protein, 21 aa, Homo sapiens
KLETTVNYTDSQRPICLPSKG

SEQ ID NO: 323 - protein, 14 aa, Homo sapiens
RVYSGILNQSEIKE

SEQ ID NO: 324 - protein, 12 aa, Homo sapiens
KGINYNSSVAKS

SEQ ID NO: 325 - protein, 10 aa, Homo sapiens
RGVNFNVSKV

SEQ ID NO: 326 - protein, 23 aa, Homo sapiens
RIVGGTNSSWGEWPWQVSLQVKL

SEQ ID NO: 327 - protein, 15 aa, Homo sapiens
RIYSGILNLSDITKD

SEQ ID NO: 328 - protein, 20 aa, Homo sapiens
KIYPGVDFGGEELNVTFVKG

SEQ ID NO: 329 - protein, 14 aa, Homo sapiens
KLQAPLNYTEFQKP

SEQ ID NO: 330 - protein, 29 aa, Homo sapiens
KEQDYLCHVYVRNDSLAGVVIADNEYPSR

SEQ ID NO: 331 - protein, 25 aa, Homo sapiens
KTNDTYMKFSWLTVPEESLDKEHRC

SEQ ID NO: 332 - protein, 12 aa, Homo sapiens
TMNPLIYNITRV

SEQ ID NO: 333 - protein, 11 aa, Homo sapiens
RVFPQVNVTKM

SEQ ID NO: 334 - protein, 30 aa, Homo sapiens
MATYSATCANNSPAQGINMANSIANLRLKA

SEQ ID NO: 335 - protein, 19 aa, Homo sapiens
RAYYGNINFFGGPSNTSVK

SEQ ID NO: 336 - protein, 26 aa, Homo sapiens
RDVMSDETNNEETESPSQEFVNITKY

SEQ ID NO: 337 - protein, 41 aa, Homo sapiens
DDDLIISQDTDIIQDMVAGENTSEAGSEDEGEVSLPEQPKV

SEQ ID NO: 338 - protein, 14 aa, Homo sapiens
KMDIENLTISNAQM

SEQ ID NO: 339 - protein, 28 aa, Homo sapiens
MISNMSEESANMIASALAQIPQKVLWRF

SEQ ID NO: 340 - protein, 30 aa, Homo sapiens
RILSNMTFLFVSLSYTAESAIVTAFITFIP

SEQ ID NO: 341 - protein, 26 aa, Homo sapiens
RNRHDLLNVSQGTVFIFWGPSSYMRR

SEQ ID NO: 342 - protein, 17 aa, Homo sapiens
AVSKQSSSTNYTNELKA

SEQ ID NO: 343 - protein, 13 aa, Homo sapiens
RSNTENLSQHFRK

SEQ ID NO: 344 - protein, 23 aa, Homo sapiens
RTCYYPTTVCLPGCLNQSCGSSC

SEQ ID NO: 345 - protein, 37 aa, Homo sapiens
TKSRVGMGGMEAKVKAALWALQGGTSVVIANGTHPKV

SEQ ID NO: 346 - protein, 27 aa, Homo sapiens
RNLNGTLHELLRMNIVPIVNTNDAVVP

SEQ ID NO: 347 - protein, 32 aa, Homo sapiens
KSVNKMQEATPSAQATNETQMCYASLDHSVKG

SEQ ID NO: 348 - protein, 25 aa, Homo sapiens
MENILSGNPLLNLTGPSQPQANFKV

SEQ ID NO: 349 - protein, 12 aa, Homo sapiens
RVQPFNVTQGKY

SEQ ID NO: 350 - protein, 19 aa, Homo sapiens
KIAVQFGPGFSWIANFTKA

SEQ ID NO: 351 - protein, 21 aa, Homo sapiens
KVASVININPNTTHSTGSCRS

SEQ ID NO: 352 - protein, 10 aa, Homo sapiens
KWQMNFTVRY

SEQ ID NO: 353 - protein, 34 aa, Homo sapiens
RKLYKCPACGETLQDSTGNFSSPEYPNGYSAHMH

SEQ ID NO: 354 - protein, 20 aa, Homo sapiens
RAETQGANHTPVISAHQTRS

SEQ ID NO: 355 - protein, 13 aa, Homo sapiens
KANQQLNFTEAKE

SEQ ID NO: 356 - protein, 20 aa, Homo sapiens
RTPQVIGVMQSQNSSAGNRG

SEQ ID NO: 357 - protein, 27 aa, Homo sapiens
KYMISTSETIIDINGTVMNYSGWSHRD

SEQ ID NO: 358 - protein, 28 aa, Homo sapiens
KRAMNKSFMESGGTVLSTNWSDVGKRKV

SEQ ID NO: 359 - protein, 29 aa, Homo sapiens
KFCVVLLHWEFIYVITAFNLSYPITPWRF

SEQ ID NO: 360 - protein, 23 aa, Homo sapiens
KDMNLTLEPEIMPAATDNRYIRA

SEQ ID NO: 361 - protein, 14 aa, Homo sapiens
RGLNSSFETSPKKV

SEQ ID NO: 362 - protein, 22 aa, Homo sapiens
RIPRADELNQTGQILVEQMGKE

SEQ ID NO: 363 - protein, 18 aa, Homo sapiens
KHYLVSNISHDTVLQCHF

SEQ ID NO: 364 - protein, 14 aa, Homo sapiens
RGNETLHYETFGKA

SEQ ID NO: 365 - protein, 20 aa, Homo sapiens
KAAPAPQEATATFNSTADRE

SEQ ID NO: 366 - protein, 23 aa, Homo sapiens
RESIASYLSLTSEDNTSFDRKKK

SEQ ID NO: 367 - protein, 21 aa, Homo sapiens
RKGIIDVNLYNETVETLMAGE

SEQ ID NO: 368 - protein, 14 aa, Homo sapiens
RVDNFTQNPGMFRI

SEQ ID NO: 369 - protein, 21 aa, Homo sapiens
RSSNSSVSGTKKEDSTAKIHA

SEQ ID NO: 370 - protein, 27 aa, Homo sapiens
RNFDNSSQNTTASVSSKGPMILLQATK

SEQ ID NO: 371 - protein, 17 aa, Homo sapiens
RLMLPDDTTNHSNSSKE

SEQ ID NO: 372 - protein, 26 aa, Homo sapiens
RNSSLGDAINKYDVVIRLNNAPVAGY

SEQ ID NO: 373 - protein, 31 aa, Homo sapiens
RRLRELAGNSSTPPPVSPGRGNPMHRLLNPF

SEQ ID NO: 374 - protein, 19 aa, Homo sapiens
CFPTLSDFLTEINSTVDKD

SEQ ID NO: 375 - protein, 23 aa, Homo sapiens
MSQHYQSGPVPGTAINGTLPLSH

SEQ ID NO: 376 - protein, 22 aa, Homo sapiens
RVVSNSSVLASQSVGITNVRTV

SEQ ID NO: 377 - protein, 32 aa, Homo sapiens
KKGDGLQLPAADGAAASNAADSANASLVNGKM

SEQ ID NO: 378 - protein, 30 aa, Homo sapiens
KQNSSPPSSLNKNNSAIDSGINLTTDTSKS

SEQ ID NO: 379 - protein, 21 aa, Homo sapiens
RKNQSVNVFLGHTAIDEMLKL

SEQ ID NO: 380 - protein, 24 aa, Homo sapiens
KGFLALYQTVAVNYSQPISEASRG

SEQ ID NO: 381 - protein, 33 aa, Homo sapiens
RQDGEEVLQCMPVCGRPVTPIAQNQTTLGSSRA

SEQ ID NO: 382 - protein, 16 aa, Homo sapiens
NVLPVCLPDNETLYRS

SEQ ID NO: 383 - protein, 31 aa, Homo sapiens
KNSSTAEINETTTSSTDFLARAYGFEMAKEF

SEQ ID NO: 384 - protein, 36 aa, Homo sapiens
KMNLTFHVINTGNSMAPNVSVEIMVPNSFSPQTDKL

SEQ ID NO: 385 - protein, 25 aa, Homo sapiens
KTLMLNVSLFNAGDDAYETTLHVKL

SEQ ID NO: 386 - protein, 23 aa, Homo sapiens
KEHSEMSNNVSDPKGPPAKIARL

SEQ ID NO: 387 - protein, 26 aa, Homo sapiens
RNGKPENNTMNINASIYDEIQQEMKR

SEQ ID NO: 388 - protein, 21 aa, Homo sapiens
KGLFKGGDMSKNVSQSQMAKL

SEQ ID NO: 389 - protein, 29 aa, Homo sapiens
MGVYGQESGGFSGPGENRSMSGPDNRGRG

SEQ ID NO: 390 - protein, 26 aa, Homo sapiens
MDPNCSCAAGVSCTCASSCKCKECKC

SEQ ID NO: 391 - protein, 29 aa, Homo sapiens
KTIDDLKNQILNLTTDNANILLQIDNARL

SEQ ID NO: 392 - protein, 19 aa, Homo sapiens
MALVLSNFSTLTLLLGQRF

SEQ ID NO: 393 - protein, 13 aa, Homo sapiens
IVLNNLSVNAENQ

SEQ ID NO: 394 - protein, 22 aa, Homo sapiens
KHLDLSSNLLKTINKSALETKT

SEQ ID NO: 395 - protein, 16 aa, Homo sapiens
KKQNDSVIAECSNRRL

SEQ ID NO: 396 - protein, 21 aa, Homo sapiens
MFSLITWNIDGLDLNNLSERA

SEQ ID NO: 397 - protein, 9 aa, Homo sapiens
KVLNFTTKA

SEQ ID NO: 398 - protein, 11 aa, Homo sapiens
RTRLSSNSTKK

SEQ ID NO: 399 - protein, 32 aa, Homo sapiens
KEGEHDLVQGSGQQPQAGLSQANFTLGPVSRS

SEQ ID NO: 400 - protein, 20 aa, Homo sapiens
KIGHPHGLQVTYLKDNSTRN

SEQ ID NO: 401 - protein, 20 aa, Homo sapiens
KGVARVVNITSPGHDASSRS

SEQ ID NO: 402 - protein, 24 aa, Homo sapiens
RVAQPGINYALGTNVSYPNNLLRN

SEQ ID NO: 403 - protein, 28 aa, Homo sapiens
KHTGPGILSMANAGPNANGSQFFMCPAK

SEQ ID NO: 404 - protein, 39 aa, Homo sapiens
RNPFHHSLPFSIPVHFTNGTYHVVGFDGSSTVDEFLQRL

SEQ ID NO: 405 - protein, 37 aa, Homo sapiens
MPIASEFAPDVVLVSSGFDAVEGHPTPLGGYNLSARC

SEQ ID NO: 406 - protein, 25 aa, Homo sapiens
NCTCVGIAASKSGNSSGIVGRCQKD

SEQ ID NO: 407 - protein, 16 aa, Homo sapiens
RIIKEALPDGVNISKE

SEQ ID NO: 408 - protein, 14 aa, Homo sapiens
GNMSGNFTYIIDKL

SEQ ID NO: 409 - protein, 14 aa, Homo sapiens
LLSNKTNAVEENKA

SEQ ID NO: 410 - protein, 35 aa, Homo sapiens
RSPYNSHMGNNASRPHSANGEVYGLLGSVLTIKKE

SEQ ID NO: 411 - protein, 16 aa, Homo sapiens
MEVCNNETISVSSYKI

SEQ ID NO: 412 - protein, 28 aa, Homo sapiens
RNCTTLQGLAPGTAYLVTVTAAFRSGRE

SEQ ID NO: 413 - protein, 15 aa, Homo sapiens
KGTNSSASSNFRCRS

SEQ ID NO: 414 - protein, 26 aa, Homo sapiens
RNSKNCTEPALHEFPNDIFTNEDRRQ

SEQ ID NO: 415 - protein, 35 aa, Homo sapiens
KTNGTLLRNGGLPGGPNKIPNGDICCIPNSNLDKA

SEQ ID NO: 416 - protein, 21 aa, Homo sapiens
FNEHMTNSTMSPGTVGQSLKS

SEQ ID NO: 417 - protein, 25 aa, Homo sapiens
KQLNVQMNMSNVMGNTTWTTSGLKS

SEQ ID NO: 418 - protein, 15 aa, Homo sapiens
RNKEVNISAVVWPSQ

SEQ ID NO: 419 - protein, 12 aa, Homo sapiens
KKQINDSANLRE

SEQ ID NO: 420 - protein, 22 aa, Homo sapiens
RSMNPNVSMVSSASSSPSSSRT

SEQ ID NO: 421 - protein, 22 aa, Homo sapiens
KATMGLLQNKENNNTKDSPSRQ

SEQ ID NO: 422 - protein, 16 aa, Homo sapiens
KLLQTTNNSPMNSKPQ

SEQ ID NO: 423 - protein, 15 aa, Homo sapiens
KRYNQSMVTAELQRL

SEQ ID NO: 424 - protein, 22 aa, Homo sapiens
RLDNITQVMSLHTQYLESFLRS

SEQ ID NO: 425 - protein, 26 aa, Homo sapiens
KFRMVYNLTYNTMATHEDVDTTMLRR

SEQ ID NO: 426 - protein, 31 aa, Homo sapiens
MNNNSGAPATAPDSAGQPPALGPVFELVSKE

SEQ ID NO: 427 - protein, 25 aa, Homo sapiens
RGPMNQCLVATGTHEPKNQSYMVRG

SEQ ID NO: 428 - protein, 17 aa, Homo sapiens
KETPPNGNLSPAPRLRR

SEQ ID NO: 429 - protein, 24 aa, Homo sapiens
RGVSGDRDENSFSLNSSISSSARR

SEQ ID NO: 430 - protein, 15 aa, Homo sapiens
MIENGSLSFLPTLRE

SEQ ID NO: 431 - protein, 16 aa, Homo sapiens
YNRTDLTTAAPSPPRR

SEQ ID NO: 432 - protein, 27 aa, Homo sapiens
KGTGSWTQLYLITDYHENGSLYDYLKS

SEQ ID NO: 433 - protein, 15 aa, Homo sapiens
RLINLYIIQNNSFSQ

SEQ ID NO: 434 - protein, 24 aa, Homo sapiens
MGINECQYQFRFGRWNCSALGEKT

SEQ ID NO: 435 - protein, 26 aa, Homo sapiens
MDGDNQSENSQFLLLGISESPEQQRI

SEQ ID NO: 436 - protein, 15 aa, Homo sapiens
MTSGNISVSWPATKE

SEQ ID NO: 437 - protein, 26 aa, Homo sapiens
MLSSSSEMNEEFLKENNSVEYKKSKA

SEQ ID NO: 438 - protein, 32 aa, Homo sapiens
RSLKEAFSNFSSSTLTEVQAISTHGGSVGDKI

SEQ ID NO: 439 - protein, 18 aa, Homo sapiens
RFVACQMELLHSNGSQRT

SEQ ID NO: 440 - protein, 24 aa, Homo sapiens
RGISARVWGHFPKWLNGSLLRIGP

SEQ ID NO: 441 - protein, 17 aa, Homo sapiens
YLANLTQSQIALNEKRV

SEQ ID NO: 442 - protein, 15 aa, Homo sapiens
KAYTDFQNNHSSPKP

SEQ ID NO: 443 - protein, 29 aa, Homo sapiens
KVLTLNLDQVDFQHAGNYSCVASNVQGKH

SEQ ID NO: 444 - protein, 18 aa, Homo sapiens
RHTNYSFSPWHGFTIHRA

SEQ ID NO: 445 - protein, 30 aa, Homo sapiens
KVMVEAYPGLQGFNWTYLGPFSDHQPEPKL

SEQ ID NO: 446 - protein, 29 aa, Homo sapiens
RHSSTDSNKASSGDISPYDNNSPVLSERS

SEQ ID NO: 447 - protein, 12 aa, Homo sapiens
KGSLSYLNVTRK

SEQ ID NO: 448 - protein, 16 aa, Homo sapiens
RGGSSGWSGGLAQNRS

SEQ ID NO: 449 - protein, 25 aa, Homo sapiens
KVASHLEVNCDKRNLTALPPDLPKD

SEQ ID NO: 450 - protein, 27 aa, Homo sapiens
RSPYEMFGDEEVMCLNGNWTEPPQCKD

SEQ ID NO: 451 - protein, 22 aa, Homo sapiens
KRDFFLANASRARSEQFINLRE

SEQ ID NO: 452 - protein, 37 aa, Homo sapiens
RLECNGTISAHCNLHLPGSSDSPASSSRVAGITGIKT

SEQ ID NO: 453 - protein, 26 aa, Homo sapiens
KSAMPIEVMMNETAQQNMENHPVIRT

SEQ ID NO: 454 - protein, 17 aa, Homo sapiens
RKKNLTLALEALVQLRG

SEQ ID NO: 455 - protein, 18 aa, Homo sapiens
CNATNAIGSASVVTVLRV

SEQ ID NO: 456 - protein, 21 aa, Homo sapiens
KANMTLTSGIMFIVSGLCAIA

SEQ ID NO: 457 - protein, 27 aa, Homo sapiens
KGASSAYLENSKGAPNNSCSEIKMNKK

SEQ ID NO: 458 - protein, 17 aa, Homo sapiens
RSDFSQTMLFQANTTRI

SEQ ID NO: 459 - protein, 23 aa, Homo sapiens
KVEFHWGHSNGSAGSEHSINGRR

SEQ ID NO: 460 - protein, 25 aa, Homo sapiens
SGVTHAAEERNQTEPSPTPSSPNRT

SEQ ID NO: 461 - protein, 18 aa, Homo sapiens
KNRNSSVVPSERARVGLA

SEQ ID NO: 462 - protein, 14 aa, Homo sapiens
KDFLNVTTEANILP

SEQ ID NO: 463 - protein, 36 aa, Homo sapiens
KVNLNSVSKSLTGLSDSVSQYSDAFLAANTSLDERE

SEQ ID NO: 464 - protein, 12 aa, Homo sapiens
RSANLTDQPSWN

SEQ ID NO: 465 - protein, 16 aa, Homo sapiens
RKLNPSQNATGTSRSE

SEQ ID NO: 466 - protein, 20 aa, Homo sapiens
KRNASSSSHSSTEGLQELKR

SEQ ID NO: 467 - protein, 25 aa, Homo sapiens
RYVKQPLPDEFGSSPLEPGACNGSR

SEQ ID NO: 468 - protein, 16 aa, Homo sapiens
KVNGSHEANMLSQVHR

SEQ ID NO: 469 - protein, 16 aa, Homo sapiens
QVGIYNGTHVIPNDRK

SEQ ID NO: 470 - protein, 22 aa, Homo sapiens
MNLSWDCQENTTFSKCFLTDKK

SEQ ID NO: 471 - protein, 23 aa, Homo sapiens
RRPLVLQLVNATTEYAEFLHCKG

SEQ ID NO: 472 - protein, 18 aa, Homo sapiens
EEYKNYLDAANMSMRVRR

SEQ ID NO: 473 - protein, 35 aa, Homo sapiens
RTLPLILILLALLSPGAADFNISSLSGLLSPALTE

SEQ ID NO: 474 - protein, 23 aa, Homo sapiens
RRRGRPRGNNLSTISDTSPMKRS

SEQ ID NO: 475 - protein, 27 aa, Homo sapiens
MGNSTDPGPMLAIPAMATNPQNAASRR

SEQ ID NO: 476 - protein, 19 aa, Homo sapiens
RVVLLDPKPVANVTCVNKH

SEQ ID NO: 477 - protein, 24 aa, Homo sapiens
EQTYHMALNAATFPKNATWIGPLW

SEQ ID NO: 478 - protein, 18 aa, Homo sapiens
KFNPGAESVVLSNSTLKF

SEQ ID NO: 479 - protein, 15 aa, Homo sapiens
KLQNLTLPTNASIKF

SEQ ID NO: 480 - protein, 27 aa, Homo sapiens
KCRLDVNTELNSSIEDLLEASMPSSDT

SEQ ID NO: 481 - protein, 37 aa, Homo sapiens
KSLMDQLQGVVSNFSTAIPDFHAVLAGPGGPGNGLRS

SEQ ID NO: 482 - protein, 20 aa, Homo sapiens
MKKVHVNSVNPNYTGGEPKR

SEQ ID NO: 483 - protein, 11 aa, Homo sapiens
RQMSQQNLTKQ

SEQ ID NO: 484 - protein, 26 aa, Homo sapiens
KMSHPPNIPKEQTPAGTSNTTSVSVK

SEQ ID NO: 485 - protein, 25 aa, Homo sapiens
KVTGSGGPFKSDPHWESMLNATTRR

SEQ ID NO: 486 - protein, 21 aa, Homo sapiens
RTNSTFVQALVEHVKEECDRL

SEQ ID NO: 487 - protein, 19 aa, Homo sapiens
RNLEKNSTKQEILAALEKG

SEQ ID NO: 488 - protein, 18 aa, Homo sapiens
RYLINSYDFVNDTLSLKH

SEQ ID NO: 489 - protein, 22 aa, Homo sapiens
VYYMVVCLVAFTIVMVLNITRL

SEQ ID NO: 490 - protein, 30 aa, Homo sapiens
KDGSNKSGAEEQGPIDGPSKSGAEEQTSKD

SEQ ID NO: 491 - protein, 33 aa, Homo sapiens
AMVNTTQQQGLSNASTEGPVADAFNNSSISIKE

SEQ ID NO: 492 - protein, 31 aa, Homo sapiens
RVQNTSLEAIVQNASSDNQGIQLSAVQAARK

SEQ ID NO: 493 - protein, 25 aa, Homo sapiens
KLDSFGPINPTLNTTYSFLTTFFKE

SEQ ID NO: 494 - protein, 21 aa, Homo sapiens
KRKEAELRSGIIRNNSLWDRL

SEQ ID NO: 495 - protein, 27 aa, Homo sapiens
GAASYFLILDSTNTVPDSAGSGNVTRC

SEQ ID NO: 496 - protein, 12 aa, Homo sapiens
KAGVVNGTGAPG

SEQ ID NO: 497 - protein, 18 aa, Homo sapiens
KVAPVINNGSPTILGKRS

SEQ ID NO: 498 - protein, 15 aa, Homo sapiens
REVYPWYNLTVEAKE

SEQ ID NO: 499 - protein, 20 aa, Homo sapiens
RLDRENISEYHLTAVIVDKD

SEQ ID NO: 500 - protein, 28 aa, Homo sapiens
RAQVIINITDVDEPPIFQQPFYHFQLKE

SEQ ID NO: 501 - protein, 26 aa, Homo sapiens
KDGSTTAGNSSQVSDGAAAILLARRS

SEQ ID NO: 502 - protein, 24 aa, Homo sapiens
LSSLSPVNSSNHGPVSTGSLTNRS

SEQ ID NO: 503 - protein, 22 aa, Homo sapiens
RNRSFQPGLDNIIFVVETGPLP

SEQ ID NO: 504 - protein, 26 aa, Homo sapiens
MADLIDGYCRLVNGTSQSFIIRPQKE

SEQ ID NO: 505 - protein, 16 aa, Homo sapiens
KYSVANDTGFVDIPKQ

SEQ ID NO: 506 - protein, 14 aa, Homo sapiens
RCEGSQPWNLTPRQ

SEQ ID NO: 507 - protein, 29 aa, Homo sapiens
IIAAGVAHAITAACTHGNLSDCGCDKEKQ

SEQ ID NO: 508 - protein, 21 aa, Homo sapiens
DLGNVPNGSALTDGSQLPSRD

SEQ ID NO: 509 - protein, 26 aa, Homo sapiens
KVSRIPQGTFSNLENLTLLDLQNNKL

SEQ ID NO: 510 - protein, 28 aa, Homo sapiens
NISRLDPQTNSSQIKDEFQTLNIVTPRV

SEQ ID NO: 511 - protein, 21 aa, Homo sapiens
MSQGAVANANSTPPPYERTRL

SEQ ID NO: 512 - protein, 27 aa, Homo sapiens
KRVYSLMENNSYPRFLESEFYQDLCKK

SEQ ID NO: 513 - protein, 16 aa, Homo sapiens
RWFSAGLASNSSWLRE

SEQ ID NO: 514 - protein, 21 aa, Homo sapiens
KSVVAPATDGGLNLTSTFLRK

SEQ ID NO: 515 - protein, 19 aa, Homo sapiens
RRGASVNRTTRTNSTPLRA

SEQ ID NO: 516 - protein, 27 aa, Homo sapiens
KLKLFLNETQTQEITEDIPVKTLNMKT

SEQ ID NO: 517 - protein, 23 aa, Homo sapiens
KSAWCEAKNITQIVGHSGCEAKS

SEQ ID NO: 518 - protein, 27 aa, Homo sapiens
KISNISSDVTVNEGSNVTLVCMANGRP

SEQ ID NO: 519 - protein, 18 aa, Homo sapiens
RYTVSNLSMQTHAARFKT

SEQ ID NO: 520 - protein, 16 aa, Homo sapiens
KLQDIFYPNTSNCAKG

SEQ ID NO: 521 - protein, 16 aa, Homo sapiens
KLQINNLTMNLIELEN

SEQ ID NO: 522 - protein, 26 aa, Homo sapiens
KAFSNSSTLANHKITHTEEKPYKCKE

SEQ ID NO: 523 - protein, 15 aa, Homo sapiens
RTHKMNVSPVPPLRR

SEQ ID NO: 524 - protein, 15 aa, Homo sapiens
NISSNSSASILESKS

SEQ ID NO: 525 - protein, 27 aa, Homo sapiens
RSGTNHYSTSSCTPPANGTDSIMANRG

SEQ ID NO: 526 - protein, 18 aa, Homo sapiens
KEYPNLSTSLDDAFLLRF

SEQ ID NO: 527 - protein, 17 aa, Homo sapiens
RLLQMPSVVNYSGLRKR

SEQ ID NO: 528 - protein, 23 aa, Homo sapiens
RRARHDSPDLAPNVTYSLPRTKS

SEQ ID NO: 529 - protein, 18 aa, Homo sapiens
VAIVYNITLDADGFSSRV

SEQ ID NO: 530 - protein, 44 aa, Homo sapiens
RMGMGNNYSGGYGTPDGLGGYGRGGGGSGGYYGQGGMSGGGWRG

SEQ ID NO: 531 - protein, 17 aa, Homo sapiens
WTPVNISDNGDHYEQRF

SEQ ID NO: 532 - protein, 24 aa, Homo sapiens
KGEGLNKTVIGDYLGERDEFNIKV

SEQ ID NO: 533 - protein, 30 aa, Homo sapiens
MNNSESHFVPNSLIGMGVLSCVFNSLAGKI

SEQ ID NO: 534 - protein, 23 aa, Homo sapiens
RLNMTTEQFTGDHTQHFLDGGEM

SEQ ID NO: 535 - protein, 29 aa, Homo sapiens
TDCGHTWNSPNCTDPKLLNGSVLGNHTKY

SEQ ID NO: 536 - protein, 32 aa, Homo sapiens
MSEEVTGQFSVHPETPKPSISSNNSNPVEDKD

SEQ ID NO: 537 - protein, 22 aa, Homo sapiens
KDLYRSNISPLTSEKDLDDFRR

SEQ ID NO: 538 - protein, 27 aa, Homo sapiens
KGLSNHFQVNHTVALSTIGESNYHFGV

SEQ ID NO: 539 - protein, 15 aa, Homo sapiens
KRRPLNNNSEIALSL

SEQ ID NO: 540 - protein, 19 aa, Homo sapiens
KVLGSSTSATNSTSVSSRK

SEQ ID NO: 541 - protein, 23 aa, Homo sapiens
KASASPGENDSGTGGEEPQRDKR

SEQ ID NO: 542 - protein, 13 aa, Homo sapiens
MCVKNSTGVEIKR

SEQ ID NO: 543 - protein, 24 aa, Homo sapiens
VNLTGLDLSQNNLSSVTNINVKKM

SEQ ID NO: 544 - protein, 13 aa, Homo sapiens
GKSVLVNGTKERD

SEQ ID NO: 545 - protein, 15 aa, Homo sapiens
RDMSISNTTMDEFRQ

SEQ ID NO: 546 - protein, 25 aa, Homo sapiens
GHKQISSSSTGCLSSPNATVQSPKH

SEQ ID NO: 547 - protein, 29 aa, Homo sapiens
RDATGNMNDTIISGMNCNGSAACGLGYDF

SEQ ID NO: 548 - protein, 13 aa, Homo sapiens
RHIKFYDNNTGKL

SEQ ID NO: 549 - protein, 32 aa, Homo sapiens
EPCYVSASEIKFDSQEGSVDQNHSWLGRKRRN

SEQ ID NO: 550 - protein, 12 aa, Homo sapiens
TNNISLMATLKA

SEQ ID NO: 551 - protein, 17 aa, Homo sapiens
MQSQAGGNNTGSTPLRK

SEQ ID NO: 552 - protein, 28 aa, Homo sapiens
AVSQNWTFHGPGASGQAAANWLAGFGRG

SEQ ID NO: 553 - protein, 22 aa, Homo sapiens
KNGTIFTISPVLLLDTISTTRF

SEQ ID NO: 554 - protein, 28 aa, Homo sapiens
MITVVQTYSTLSNSTIEGIDIMAIKFRN

SEQ ID NO: 555 - protein, 33 aa, Homo sapiens
MNEILTDPSDDTKGFFDPNTEENLTYLQLMERC

SEQ ID NO: 556 - protein, 28 aa, Homo sapiens
RTVNSLNVSAISIPEHDEADEISDENRE

SEQ ID NO: 557 - protein, 20 aa, Homo sapiens
NLSENYTLSISNARISDEKR

SEQ ID NO: 558 - protein, 14 aa, Homo sapiens
KNAIKEGDNITLKC

SEQ ID NO: 559 - protein, 29 aa, Homo sapiens
RVEIISNNSIQAVFNPTGVYAPSGYSYRC

SEQ ID NO: 560 - protein, 23 aa, Homo sapiens
KNCTNNCTFVYAAEQPPEAPGKI

SEQ ID NO: 561 - protein, 15 aa, Homo sapiens
KWRSNTSLLQQNLRQ

SEQ ID NO: 562 - protein, 20 aa, Homo sapiens
MDLSNNTMSLSVRTPGLSRR

SEQ ID NO: 563 - protein, 18 aa, Homo sapiens
PGAYNNTALFEESGLIRI

SEQ ID NO: 564 - protein, 25 aa, Homo sapiens
KNQSASPPPKDRSSSPATEQSWTQN

SEQ ID NO: 565 - protein, 32 aa, Homo sapiens
RDLDGFLAQASIVLNETATSLDNVLRTMLRRF

SEQ ID NO: 566 - protein, 18 aa, Homo sapiens
VQDSVNISGHTNTNTLKV

SEQ ID NO: 567 - protein, 19 aa, Homo sapiens
FGNFQGLMEANVSLDLGKL

SEQ ID NO: 568 - protein, 22 aa, Homo sapiens
KFNTTYINIGSSYFPEHGYFRA

SEQ ID NO: 569 - protein, 16 aa, Homo sapiens
RSFNQSLHSLTQAIRN

SEQ ID NO: 570 - protein, 13 aa, Homo sapiens
VYNPSGLNLSIKG

SEQ ID NO: 571 - protein, 25 aa, Homo sapiens
RQLCGLLLGGGGNRSHSTPYCGLRR

SEQ ID NO: 572 - protein, 14 aa, Homo sapiens
CCTSEMEENLANRS

SEQ ID NO: 573 - protein, 17 aa, Homo sapiens
KTGTTLNTSIIFGPNLS

SEQ ID NO: 574 - protein, 39 aa, Homo sapiens
KNFAQNRGAGNTSSLNPLAVGFVQTPPVISSAHIQDERV

SEQ ID NO: 575 - protein, 34 aa, Homo sapiens
RSLSTPNALSFGSPTSSDDMTLTSPSMDNSSAEL

SEQ ID NO: 576 - protein, 31 aa, Homo sapiens
KFCHSQLSNNSVSFFLYNLDHSHANYYFCNL

SEQ ID NO: 577 - protein, 26 aa, Homo sapiens
DAYYVYRLQVSSINVSVNAVQTVVRQ

SEQ ID NO: 578 - protein, 23 aa, Homo sapiens
RSILHIPSAELEDSGTYTCNVTE

SEQ ID NO: 579 - protein, 21 aa, Homo sapiens
ALLNNSHYYHMAHGTDFASRG

SEQ ID NO: 580 - protein, 17 aa, Homo sapiens
RDDNSAANNSANEKERH

SEQ ID NO: 581 - protein, 22 aa, Homo sapiens
KLMISSYSGSVDIVNTTDGCHE

SEQ ID NO: 582 - protein, 30 aa, Homo sapiens
RLMQGDQILMVNGEDVRNATQEAVAALLKC

SEQ ID NO: 583 - protein, 27 aa, Homo sapiens
KGQNLNNYSFSTNGFSGSGGSGSHGSS

SEQ ID NO: 584 - protein, 19 aa, Homo sapiens
KQQNHTLDYNLAPGPLGRG

SEQ ID NO: 585 - protein, 20 aa, Homo sapiens
REAPGMALAMLMGSLNVTPL

SEQ ID NO: 586 - protein, 10 aa, Homo sapiens
RRLSLNQSRG

SEQ ID NO: 587 - protein, 24 aa, Homo sapiens
KELVNAGCNLSTLNITLLSWSKKR

SEQ ID NO: 588 - protein, 17 aa, Homo sapiens
KLPKNEPQNATGAPGRN

SEQ ID NO: 589 - protein, 25 aa, Homo sapiens
KMEDGLLTCHGPGPDNCTKCSHFKD

SEQ ID NO: 590 - protein, 27 aa, Homo sapiens
REGDNRERALNTTQPGSLQLTVGNLKP

SEQ ID NO: 591 - protein, 18 aa, Homo sapiens
RVMVHGRNHTPFLGHHSF

SEQ ID NO: 592 - protein, 21 aa, Homo sapiens
RLQQLAEPQSDLEELKHENKS

SEQ ID NO: 593 - protein, 20 aa, Homo sapiens
KENLPENVTASESDAEVERS

SEQ ID NO: 594 - protein, 12 aa, Homo sapiens
DYNVQTSNWTRT

SEQ ID NO: 595 - protein, 28 aa, Homo sapiens
RLKNISENADFFASLQLSESAARLREMI

SEQ ID NO: 596 - protein, 23 aa, Homo sapiens
KASLCLPTTSAPASAPSNGNCSS

SEQ ID NO: 597 - protein, 26 aa, Homo sapiens
KENSTASEVLDSLSQSVHVKPENLRL

SEQ ID NO: 598 - protein, 32 aa, Homo sapiens
RSIQKLGELNIGMDGLGNEVSALNQQCNGSKG

SEQ ID NO: 599 - protein, 22 aa, Homo sapiens
RHVLATILAQLSDMDLINVSKV

SEQ ID NO: 600 - protein, 17 aa, Homo sapiens
RFIGLTNSFGFGGTNAT

SEQ ID NO: 601 - protein, 32 aa, Homo sapiens
RPPSAPQNLIFNINQTTVSLEWSPPADNGGRN

SEQ ID NO: 602 - protein, 15 aa, Homo sapiens
KDNFTAAGYNSLESV

SEQ ID NO: 603 - protein, 30 aa, Homo sapiens
KHQVEALKNMQHQNQSLSMLDEILEDVRKA

SEQ ID NO: 604 - protein, 37 aa, Homo sapiens
KSEMAQIQQNAVQNHTATMLEIGTSLLSQTAEQTRKL

SEQ ID NO: 605 - protein, 29 aa, Homo sapiens
RDCADVYQAGFNKSGIYTIYINNMPEPKK

SEQ ID NO: 606 - protein, 12 aa, Homo sapiens
KRGNTTLESTDT

SEQ ID NO: 607 - protein, 34 aa, Homo sapiens
KRLVSMNMPLNSDGTVMFNATLFALVRTALRIKT

SEQ ID NO: 608 - protein, 18 aa, Homo sapiens
KCAPESEPSNSTEGETPC

SEQ ID NO: 609 - protein, 22 aa, Homo sapiens
KLMGSAGNATISTVSSTQRKRQ

SEQ ID NO: 610 - protein, 25 aa, Homo sapiens
MNQNTTEPVAATETLAEVPEHVLRG

SEQ ID NO: 611 - protein, 40 aa, Homo sapiens
RSQSSSQSPASHRNPTGAHSSSGHQSQSPNTSPPPKRHKK

SEQ ID NO: 612 - protein, 25 aa, Homo sapiens
KEPHLNYSPTCLEPPVLSIHPGAID

SEQ ID NO: 613 - protein, 21 aa, Homo sapiens
RGATAAVLAPDSSNASSEPSS

SEQ ID NO: 614 - protein, 36 aa, Homo sapiens
KVKMVVSREEVELAYQEAMFNMATLNRTAAGLMHTF

SEQ ID NO: 615 - protein, 18 aa, Homo sapiens
RMFTNPDNGSPAMTHRNL

SEQ ID NO: 616 - protein, 20 aa, Homo sapiens
MANAGPNTNGSQCFICTAKT

SEQ ID NO: 617 - protein, 21 aa, Homo sapiens
RDPNIEALNGNCSDTEIHEKE

SEQ ID NO: 618 - protein, 33 aa, Homo sapiens
MVISPSGFTASPYEGENSSNIIPQQMAAHMLRS

SEQ ID NO: 619 - protein, 25 aa, Homo sapiens
MNSTDIQWSAILSWGYADNILRLKS

SEQ ID NO: 620 - protein, 16 aa, Homo sapiens
RSTIISNTTNPIWHRE

SEQ ID NO: 621 - protein, 30 aa, Homo sapiens
RPQSNSSAVTGTSGSIMENGVSSSNTADKS

SEQ ID NO: 622 - protein, 24 aa, Homo sapiens
RLIGEPDLVVSVIPNNSNENIPRV

SEQ ID NO: 623 - protein, 32 aa, Homo sapiens
RRNAEWHVHMMEYYAAENMNNWSHGMNEAERF

SEQ ID NO: 624 - protein, 21 aa, Homo sapiens
KMFILSDGEGKNGTIELMEPL

SEQ ID NO: 625 - protein, 20 aa, Homo sapiens
RVLELNASDERGIQVVREKV

SEQ ID NO: 626 - protein, 10 aa, Homo sapiens
RWEYCNLTRC

SEQ ID NO: 627 - protein, 28 aa, Homo sapiens
KVLLNSSVPPAGAEELSSAMANPPPKRP

SEQ ID NO: 628 - protein, 41 aa, Homo sapiens
RLLLTAAHLLFVAPHNDSATGEPEASSGSGPPSGGALGPRA

SEQ ID NO: 629 - protein, 16 aa, Homo sapiens
MHAVVFGNVTAIIQRM

SEQ ID NO: 630 - protein, 25 aa, Homo sapiens
KGDYNDSVQVVDCGLSLNDTAFEKM

SEQ ID NO: 631 - protein, 25 aa, Homo sapiens
KLEFALLFLVFDENESWYLDDNIKT

SEQ ID NO: 632 - protein, 16 aa, Homo sapiens
KAGLQAFFQVQECNKS

SEQ ID NO: 633 - protein, 22 aa, Homo sapiens
KENLTAPGSDSAVFFEQGTTRI

SEQ ID NO: 634 - protein, 18 aa, Homo sapiens
KEHEGAIYPDNTTDFQRA

SEQ ID NO: 635 - protein, 19 aa, Homo sapiens
KELHHLQEQNVSNAFLDKG

SEQ ID NO: 636 - protein, 30 aa, Homo sapiens
RQKDVDKEFYLFPTVFDENESLLLEDNIRM

SEQ ID NO: 637 - protein, 22 aa, Homo sapiens
RNLFLTNLDNLHENNTHNQEKK

SEQ ID NO: 638 - protein, 22 aa, Homo sapiens
RLMEEIMSEKENKTIVFVETKR

SEQ ID NO: 639 - protein, 26 aa, Homo sapiens
RHLTLIDLSNNSISMLTNYTFSNMSH

SEQ ID NO: 640 - protein, 18 aa, Homo sapiens
RHLTLIDLSNNSISMLTN

SEQ ID NO: 641 - protein, 17 aa, Homo sapiens
KFGLYHVDFNNTNRPRT

SEQ ID NO: 642 - protein, 12 aa, Homo sapiens
KTMQENSTPRED

SEQ ID NO: 643 - protein, 27 aa, Homo sapiens
KNCGVNCSGDVFTALIGEIASPNYPKP

SEQ ID NO: 644 - protein, 20 aa, Homo sapiens
HCAGNGSWVNEVLGPELPKC

SEQ ID NO: 645 - protein, 19 aa, Homo sapiens
KGLGAQTGVLRMKGVNLSC

SEQ ID NO: 646 - protein, 18 aa, Homo sapiens
AEESPFVGNPGNITGARG

SEQ ID NO: 647 - protein, 15 aa, Homo sapiens
KVQNMSQSIEVLDRR

SEQ ID NO: 648 - protein, 25 aa, Homo sapiens
RESNAPSVPTVSLLPGAPGGNASSR

SEQ ID NO: 649 - protein, 13 aa, Homo sapiens
MEEVRKVNESIKY

SEQ ID NO: 650 - protein, 10 aa, Homo sapiens
MSNITVTYRD

SEQ ID NO: 651 - protein, 21 aa, Homo sapiens
REALNISSSISESGGLNWKMT

SEQ ID NO: 652 - protein, 24 aa, Homo sapiens
RDEDTLQDPAPLETPMNASSSHSC

SEQ ID NO: 653 - protein, 11 aa, Homo sapiens
KNESKEKSNKR

SEQ ID NO: 654 - protein, 40 aa, Homo sapiens
MAAANPWDPASAPNGAGLVLGHFIASGMVNQEMLNMSKKT

SEQ ID NO: 655 - protein, 25 aa, Homo sapiens
KNHTHQQDIDDLKRQNALLEQQVRA

SEQ ID NO: 656 - protein, 28 aa, Homo sapiens
MMRGQGLNMTPSMVAPSGMPATMSNPRI

SEQ ID NO: 657 - protein, 28 aa, Homo sapiens
KALWNSSVPVCEQIFCPNPPAILNGRHT

SEQ ID NO: 658 - protein, 22 aa, Homo sapiens
RAYLLPAPPAPGNASESEEDRS

SEQ ID NO: 659 - protein, 20 aa, Homo sapiens
KVDYESQSTDTQNFSSESKR

SEQ ID NO: 660 - protein, 13 aa, Homo sapiens
RGLCVNASAVSRL

SEQ ID NO: 661 - protein, 33 aa, Homo sapiens
RFLIEDINDNAPLFPATVINISIPENSAINSKY

SEQ ID NO: 662 - protein, 24 aa, Homo sapiens
RYIVNPVNDTVVLSENIPLNTKIA

SEQ ID NO: 663 - protein, 37 aa, Homo sapiens
RVSGAVATAVLWVLAALLAMPVMVLRTTGDLENTTKV

SEQ ID NO: 664 - protein, 23 aa, Homo sapiens
FVQNCTSLNSLNEVIPTDLQSKF

SEQ ID NO: 665 - protein, 13 aa, Homo sapiens
KVGSFGNGTVLRS

SEQ ID NO: 666 - protein, 23 aa, Homo sapiens
KTFLHYDCGNKTVTPVSPLGKKL

SEQ ID NO: 667 - protein, 18 aa, Homo sapiens
RIPNNTQWVTWSPVGHKL

SEQ ID NO: 668 - protein, 13 aa, Homo sapiens
KKLDFIILNETKF

SEQ ID NO: 669 - protein, 29 aa, Homo sapiens
KNSDFYMGAGGPLEHVMETLDNESFYSKA

SEQ ID NO: 670 - protein, 11 aa, Homo sapiens
MKYLNLSSTRI

SEQ ID NO: 671 - protein, 17 aa, Homo sapiens
LFQNITLEDAGSYTLRT

SEQ ID NO: 672 - protein, 34 aa, Homo sapiens
RDNLSETASTMALAGASITGSLSGSAMVNCFNRL

SEQ ID NO: 673 - protein, 29 aa, Homo sapiens
KTMNNSAENHTANSSMAYPSLVAMASQRQ

SEQ ID NO: 674 - protein, 26 aa, Homo sapiens
RYVHDGSETLTDSFVLMANASEMDRQ

SEQ ID NO: 675 - protein, 33 aa, Homo sapiens
RGVNASAVVNVTVRALLHVWAGGPWPQGATLRL

SEQ ID NO: 676 - protein, 17 aa, Homo sapiens
KHSRIVELLNETEKYKL

SEQ ID NO: 677 - protein, 26 aa, Homo sapiens
AYLMEPLCISSNESSEGCCPPSGTRQ

SEQ ID NO: 678 - protein, 25 aa, Homo sapiens
MFQNAVMYNSSDHDVYHMAVEMQRD

SEQ ID NO: 679 - protein, 31 aa, Homo sapiens
PRMSVLRSAETMQSALAAMQQFYGINMTGKV

SEQ ID NO: 680 - protein, 13 aa, Homo sapiens
AIMNNMSLIIHRS

SEQ ID NO: 681 - protein, 37 aa, Homo sapiens
RCFPWTNITPPALPGITNDTTIQQGISGLIDSLNARD

SEQ ID NO: 682 - protein, 27 aa, Homo sapiens
KNYSPYYNTIDDLKDQIVDLTVGNNKT

SEQ ID NO: 683 - protein, 18 aa, Homo sapiens
FHGLYEEKNLSPGFNFRF

SEQ ID NO: 684 - protein, 25 aa, Homo sapiens
RVYLQGLIDYYLFGNSSTVLEDSKS

SEQ ID NO: 685 - protein, 32 aa, Homo sapiens
RCKNQNTFLLTTFANVVNVCGNPNMTCPSNKT

SEQ ID NO: 686 - protein, 27 aa, Homo sapiens
TPADVFIVFTDNETFAGGVHPAIALRE

SEQ ID NO: 687 - protein, 23 aa, Homo sapiens
RVLGSILNASTVAAAMCMVVTRT

SEQ ID NO: 688 - protein, 25 aa, Homo sapiens
KDRNASNDGFEMCSLSDFSANEQKS

SEQ ID NO: 689 - protein, 24 aa, Homo sapiens
KQDYNMDLELDEYYNKTLATENNT

SEQ ID NO: 690 - protein, 19 aa, Homo sapiens
RSSINSVDGESPNGSSDRG

SEQ ID NO: 691 - protein, 21 aa, Homo sapiens
RSEGSSVNLSPPLEQCVPDRG

SEQ ID NO: 692 - protein, 25 aa, Homo sapiens
RYPHKPEINSTTHPGADLQENFCRN

SEQ ID NO: 693 - protein, 12 aa, Homo sapiens
KNFTENDLLVRI

SEQ ID NO: 694 - protein, 9 aa, Homo sapiens
RGHVNITRS

SEQ ID NO: 695 - protein, 15 aa, Homo sapiens
KNLFLNHSENATAKD

SEQ ID NO: 696 - protein, 18 aa, Homo sapiens
KVVLHPNYSQVDIGLIKL

SEQ ID NO: 697 - protein, 26 aa, Homo sapiens
KMVSHHNLTTGATLINEQWLLTTAKN

SEQ ID NO: 698 - protein, 27 aa, Homo sapiens
RGNVAVTVSGHTCQHWSAQTPHTHNRT

SEQ ID NO: 699 - protein, 15 aa, Homo sapiens
RNHSCEPCQTLAVRS

SEQ ID NO: 700 - protein, 10 aa, Homo sapiens
RNVTAEQARN

SEQ ID NO: 701 - protein, 23 aa, Homo sapiens
RSPYYNVSDEISFHCYDGYTLRG

SEQ ID NO: 702 - protein, 32 aa, Homo sapiens
KIVLDPSGSMNIYLVLDGSDSIGASNFTGAKK

SEQ ID NO: 703 - protein, 24 aa, Homo sapiens
KALQAVYSMMSWPDDVPPEGWNRT

SEQ ID NO: 704 - protein, 14 aa, Homo sapiens
RGSANRTCQVNGRW

SEQ ID NO: 705 - protein, 18 aa, Homo sapiens
KINMNGINNSSGMVDARS

SEQ ID NO: 706 - protein, 9 aa, Homo sapiens
SRGCNVSRK

SEQ ID NO: 707 - protein, 24 aa, Homo sapiens
RHRAGMQNLTEFIGSEPSKKRKRR

SEQ ID NO: 708 - protein, 33 aa, Homo sapiens
FTTCCTLSEEFACVDNLADLVFGELCGVNENRT

SEQ ID NO: 709 - protein, 12 aa, Homo sapiens
RDIENFNSTQKF

SEQ ID NO: 710 - protein, 14 aa, Homo sapiens
RYAEDKFNETTEKS

SEQ ID NO: 711 - protein, 11 aa, Homo sapiens
KHNFSHCCSKV

SEQ ID NO: 712 - protein, 16 aa, Homo sapiens
KQNSDHSNGSFNLKAL

SEQ ID NO: 713 - protein, 29 aa, Homo sapiens
RTEAPEGTESEMETPSAINGNPSWHLADS

SEQ ID NO: 714 - protein, 24 aa, Homo sapiens
RALQWNAGSGGLPENETTFARILQ

SEQ ID NO: 715 - protein, 18 aa, Homo sapiens
RRNNSIRRNNSSLMVPKV

SEQ ID NO: 716 - protein, 17 aa, Homo sapiens
KLRWDPADYENVTSIRI

SEQ ID NO: 717 - protein, 17 aa, Homo sapiens
RQFNQTVQSSGNMTDKS

SEQ ID NO: 718 - protein, 11 aa, Homo sapiens
VPITNATLDRI

SEQ ID NO: 719 - protein, 17 aa, Homo sapiens
RQNQCFYNSSYLNVQRE

SEQ ID NO: 720 - protein, 18 aa, Homo sapiens
KSVQEIQATFFYFTPNKT

SEQ ID NO: 721 - protein, 9 aa, Homo sapiens
RENGTVSRY

SEQ ID NO: 722 - protein, 8 aa, Homo sapiens
RNEEYNKS

SEQ ID NO: 723 - protein, 18 aa, Homo sapiens
RNSTELSEMFPVLPGSHL

SEQ ID NO: 724 - protein, 30 aa, Homo sapiens
MLVNGENFGVSLNIFPSVAINKSSGAPRRV

SEQ ID NO: 725 - protein, 20 aa, Homo sapiens
KDNKSPLHLVQMPPVIVETA

SEQ ID NO: 726 - protein, 11 aa, Homo sapiens
RQNSSPHLPKL

SEQ ID NO: 727 - protein, 17 aa, Homo sapiens
RNTSPDTNYTLYYWHRS

SEQ ID NO: 728 - protein, 13 aa, Homo sapiens
AFNCPPNSTMNRG

SEQ ID NO: 729 - protein, 30 aa, Homo sapiens
RQPGKAPNFSVNWTVGDSAIEVINATTGKD

SEQ ID NO: 730 - protein, 30 aa, Homo sapiens
KTGFTQLGTSCITNHTCSNADETFCEMVKS

SEQ ID NO: 731 - protein, 30 aa, Homo sapiens
KVDNLVVNGTGTNSTNSTTAVPSLVALEKI

SEQ ID NO: 732 - protein, 19 aa, Homo sapiens
RKQEEFDVANNGSSQANKL

SEQ ID NO: 733 - protein, 28 aa, Homo sapiens
KSPTSPTQNLFPASKTSPVNLPNKSSIP

SEQ ID NO: 734 - protein, 14 aa, Homo sapiens
KEIENLTQQYEEKA

SEQ ID NO: 735 - protein, 28 aa, Homo sapiens
RMIEQYHNHSDHYCLNLDSGMVIDSYRM

SEQ ID NO: 736 - protein, 25 aa, Homo sapiens
RINNGGCQDLCLLTHQGHVNCSCRG

SEQ ID NO: 737 - protein, 13 aa, Homo sapiens
RFNSTEYQVVTRV

SEQ ID NO: 738 - protein, 15 aa, Homo sapiens
RMHLNGSNVQVLHRT

SEQ ID NO: 739 - protein, 27 aa, Homo sapiens
RELQGNCSRLGCQHHCVPTLDGPTCYC

SEQ ID NO: 740 - protein, 29 aa, Homo sapiens
KDNATDSVPLRTGIGVQLKDIKVFNRDRQ

SEQ ID NO: 741 - protein, 41 aa, Homo sapiens
KSDALVPVSGTSLAVGIDFHAENDTIYWVDMGLSTISRAKR

SEQ ID NO: 742 - protein, 24 aa, Homo sapiens
TELQLAAVETTANSLMWILYNLSR

SEQ ID NO: 743 - protein, 16 aa, Homo sapiens
RILKVAEFFNYSKNRI

SEQ ID NO: 744 - protein, 14 aa, Homo sapiens
RNSNVSQASMSSRM

SEQ ID NO: 745 - protein, 24 aa, Homo sapiens
TGNYTACQKDLCCHLTYKMSEKRT

SEQ ID NO: 746 - protein, 29 aa, Homo sapiens
KWSPTGPATSNPNSSIMLASASFDSTVRL

SEQ ID NO: 747 - protein, 32 aa, Homo sapiens
RRRNVSGNNGPFGQDKNIAMTGQITSTKPKRT

SEQ ID NO: 748 - protein, 15 aa, Homo sapiens
KAAHNNSENIPLHKS

SEQ ID NO: 749 - protein, 25 aa, Homo sapiens
YNQSTATTLFHSLPLLRYIFVRERV

SEQ ID NO: 750 - protein, 39 aa, Homo sapiens
MGMNTGTNAGMNPGMLAAGNGQGIMPNQVMNGSIGAGRG

SEQ ID NO: 751 - protein, 32 aa, Homo sapiens
RLSHNELADSGIPGNSFNVSSLVELDLSYNKL

SEQ ID NO: 752 - protein, 21 aa, Homo sapiens
KLGSFEGLVNLTFIHLQHNRL

SEQ ID NO: 753 - protein, 19 aa, Homo sapiens
KLHINHNNLTESVGPLPKS

SEQ ID NO: 754 - protein, 24 aa, Homo sapiens
KAFENVTDLQWLILDHNLLENSKI

SEQ ID NO: 755 - protein, 12 aa, Homo sapiens
RYLSLRNNSLRT

SEQ ID NO: 756 - protein, 23 aa, Homo sapiens
KAGAFLGLTNVAVMNLSGNCLRN

SEQ ID NO: 757 - protein, 37 aa, Homo sapiens
RFVQAICEGDDCQPPAYTYNNITCASPPEVVGLDLRD

SEQ ID NO: 758 - protein, 17 aa, Homo sapiens
KALRDFALQNPSAVPRF

SEQ ID NO: 759 - protein, 30 aa, Homo sapiens
RWLSSTGPECNCSLGNFDSQVGACGFNSRI

SEQ ID NO: 760 - protein, 27 aa, Homo sapiens
KAMAETFYLSNIVPQDFDNNSGYWNRI

SEQ ID NO: 761 - protein, 38 aa, Homo sapiens
LDLSMNNISQLLPNPLPSLRFLEELRLAGNALTYIPKG

SEQ ID NO: 762 - protein, 32 aa, Homo sapiens
KIHHIPDYAFGNLSSLVVLHLHNNRIHSLGKK

SEQ ID NO: 763 - protein, 17 aa, Homo sapiens
KENSSVEAKDSGLESKK

SEQ ID NO: 764 - protein, 18 aa, Homo sapiens
MKTQEPAGSLEENNSDKN

SEQ ID NO: 765 - protein, 24 aa, Homo sapiens
KTTTRQLSSPNHSPSQSPNQSPRI

SEQ ID NO: 766 - protein, 28 aa, Homo sapiens
RAQTEGINISEEALNHLGEIGTKTTLRY

SEQ ID NO: 767 - protein, 19 aa, Homo sapiens
KEIQHPNVITLHEVYENKT

SEQ ID NO: 768 - protein, 36 aa, Homo sapiens
KVSMMEKSELVNETRWQYYGTANTSGNLSLTWHVKS

SEQ ID NO: 769 - protein, 46 aa, Homo sapiens
RFGGFGGPGGVGGLGGPGGFGPGGYPGGIHEVSVNQSLLQPLNVKV

SEQ ID NO: 770 - protein, 27 aa, Homo sapiens
RMSGDLSSNVTVSVTSSTISSNVASKA

SEQ ID NO: 771 - protein, 13 aa, Homo sapiens
KVDEFNVSSPQFV

SEQ ID NO: 772 - protein, 31 aa, Homo sapiens
MQNNWCFPACSFNGTSAQEWFMAQDCPYRKR

SEQ ID NO: 773 - protein, 13 aa, Homo sapiens
KNVTFWGRPLPRC

SEQ ID NO: 774 - protein, 24 aa, Homo sapiens
RCTCGFSAVMNRKFGNNSGLFLED

SEQ ID NO: 775 - protein, 17 aa, Homo sapiens
RMLWEHNSTIIVMLTKL

SEQ ID NO: 776 - protein, 19 aa, Homo sapiens
RKVEVEPLNSTAVHVYWKL

SEQ ID NO: 777 - protein, 20 aa, Homo sapiens
RQNVYIPGSNATLTNAAGKR

SEQ ID NO: 778 - protein, 18 aa, Homo sapiens
RNPSASTFLHLSTNSFRL

SEQ ID NO: 779 - protein, 27 aa, Homo sapiens
RMQSPQNLHGQQDDDSAAESFNGNETL

SEQ ID NO: 780 - protein, 28 aa, Homo sapiens
KMFLNNTTTNRHTSGEGPGSKTGDKEEK

SEQ ID NO: 781 - protein, 19 aa, Homo sapiens
KLGYNANTSVLSFQAVCRE

SEQ ID NO: 782 - protein, 26 aa, Homo sapiens
KTLPDSAGYVEGLQCMSVENATTIRT

SEQ ID NO: 783 - protein, 24 aa, Homo sapiens
KEGKENTRITNLTVNTGLDCSEKT

SEQ ID NO: 784 - protein, 19 aa, Homo sapiens
KEASDIILTDDNFTSIVKA

SEQ ID NO: 785 - protein, 20 aa, Homo sapiens
RSNHTQATNDPPEVTVFPKE

SEQ ID NO: 786 - protein, 33 aa, Homo sapiens
KDQYVEPENVTIQCDSGYGVVGPQSITCSGNRT

SEQ ID NO: 787 - protein, 24 aa, Homo sapiens
RFSLLGHASISCTVENETIGVWRP

SEQ ID NO: 788 - protein, 33 aa, Homo sapiens
MKLGTEALSTNHSVIVNSPVITAAINKEFSNKV

SEQ ID NO: 789 - protein, 25 aa, Homo sapiens
KQSESSFITGDINSSASLNREGLLN

SEQ ID NO: 790 - protein, 38 aa, Homo sapiens
KNENSSEQLDVDGDSSSEVSSEVNFNYEYAQMEVTMKA

SEQ ID NO: 791 - protein, 36 aa, Homo sapiens
RMIEDAIRSHSESASPSALSSSPNNLSPTGWSQPKT

SEQ ID NO: 792 - protein, 28 aa, Homo sapiens
RMELSMGPIQANHTGTGLLLTLQPEQKF

SEQ ID NO: 793 - protein, 27 aa, Homo sapiens
REVSFLNCSLDNGGCTHYCLEEVGWRR

SEQ ID NO: 794 - protein, 10 aa, Homo sapiens
RYFYNNQTKQ

SEQ ID NO: 795 - protein, 18 aa, Homo sapiens
PASSDFSDLNTQTNWTKS

SEQ ID NO: 796 - protein, 11 aa, Homo sapiens
RMDGSLNFNRT

SEQ ID NO: 797 - protein, 31 aa, Homo sapiens
RVSGYLNLAADLAHNFTDGLAIGASFRGGRG

SEQ ID NO: 798 - protein, 17 aa, Homo sapiens
KDLQSLEDILHQVENKT

SEQ ID NO: 799 - protein, 21 aa, Homo sapiens
DNTLQQNSSSNISYSNAMQKE

SEQ ID NO: 800 - protein, 25 aa, Homo sapiens
RNGIALEILQNTSYLPVLEGQALRL

SEQ ID NO: 801 - protein, 29 aa, Homo sapiens
GGQSPASGNVTGNSNSTFISSGQVMNFKG

SEQ ID NO: 802 - protein, 35 aa, Homo sapiens
RSEHTGACNPCTEGVDYTNASNNEPSCFPCTVCKS

SEQ ID NO: 803 - protein, 18 aa, Homo sapiens
KLNITNIWVLDYFGGPKI

SEQ ID NO: 804 - protein, 26 aa, Homo sapiens
KCTLHFLTPGVNNSGSYICRPKMIKS

SEQ ID NO: 805 - protein, 25 aa, Homo sapiens
RRKFVCFVQNSIGNTTQSVQLKEKR

SEQ ID NO: 806 - protein, 19 aa, Homo sapiens
KSEHNPSTSGCSSDQSSKV

SEQ ID NO: 807 - protein, 17 aa, Homo sapiens
MNRSQFEELCAELLQKI

SEQ ID NO: 808 - protein, 16 aa, Homo sapiens
KELNNTCEPVVTQPKP

SEQ ID NO: 809 - protein, 18 aa, Homo sapiens
KNQQITHANNTVSNFKRF

SEQ ID NO: 810 - protein, 23 aa, Homo sapiens
RVAVVQHAPSESVDNASMPPVKV

SEQ ID NO: 811 - protein, 25 aa, Homo sapiens
KEHKAEKVPAVANYIMKIHNFTSKC

SEQ ID NO: 812 - protein, 17 aa, Homo sapiens
KFVEGSHNSTVSLTTKN

SEQ ID NO: 813 - protein, 17 aa, Homo sapiens
RFNSSYLQGTNQITGRY

SEQ ID NO: 814 - protein, 18 aa, Homo sapiens
KNLTDFAEQYSIQDWAKR

SEQ ID NO: 815 - protein, 18 aa, Homo sapiens
RVNQNLVYESGSLNFSKL

SEQ ID NO: 816 - protein, 21 aa, Homo sapiens
KQVLFLDTVYGNCSTHFTVKT

SEQ ID NO: 817 - protein, 19 aa, Homo sapiens
RFEVDSPVYNATWSASLKN

SEQ ID NO: 818 - protein, 19 aa, Homo sapiens
KYNQNFSAGNNENIMEAHV

SEQ ID NO: 819 - protein, 38 aa, Homo sapiens
KSSVITLNTNAELFNQSDIVAHLLSSSSSVIDALQYKL

SEQ ID NO: 820 - protein, 18 aa, Homo sapiens
KTIHDLHLFIENIDFNKS

SEQ ID NO: 821 - protein, 35 aa, Homo sapiens
KIQSPLFTLDANADIGNGTTSANEAGIAASITAKG

SEQ ID NO: 822 - protein, 15 aa, Homo sapiens
KYDFNSSMLYSTAKG

SEQ ID NO: 823 - protein, 8 aa, Homo sapiens
KSYNETKI

SEQ ID NO: 824 - protein, 35 aa, Homo sapiens
KQVFPGLNYCTSGAYSNASSTDSASYYPLTGDTRL

SEQ ID NO: 825 - protein, 29 aa, Homo sapiens
KDFHSEYIVSASNFTSQLSSQVEQFLHRN

SEQ ID NO: 826 - protein, 16 aa, Homo sapiens
AEEEMLENVSLVCPKD

SEQ ID NO: 827 - protein, 13 aa, Homo sapiens
GGNTSTDHFSLRA

SEQ ID NO: 828 - protein, 26 aa, Homo sapiens
KVHNGSEILFSYFQDLVITLPFELRK

SEQ ID NO: 829 - protein, 32 aa, Homo sapiens
KLYQLQVPLLGVLDLSTNVYSNLYNWSASYSG

SEQ ID NO: 830 - protein, 26 aa, Homo sapiens
RALKGETVNTTISFSFKGIKFSKGKY

SEQ ID NO: 831 - protein, 17 aa, Homo sapiens
KLNDTTLQVLNTWYTKQ

SEQ ID NO: 832 - protein, 23 aa, Homo sapiens
AHAASTEEKEAGVGNGTCAPVRL

SEQ ID NO: 833 - protein, 15 aa, Homo sapiens
RSLYGKEDNDTLVRC

SEQ ID NO: 834 - protein, 21 aa, Homo sapiens
RTFTDKWEDYPKSENESNIRY

SEQ ID NO: 835 - protein, 24 aa, Homo sapiens
KQISESTNHIYSNLANCSPNRQKP

SEQ ID NO: 836 - protein, 21 aa, Homo sapiens
KFNGGGHINHSIFWTNLSPNG

SEQ ID NO: 837 - protein, 18 aa, Homo sapiens
KVQGLVPAGGSSSNSTRE

SEQ ID NO: 838 - protein, 14 aa, Homo sapiens
RQNMCPAHQNRSLA

SEQ ID NO: 839 - protein, 22 aa, Homo sapiens
RMAWPEDHVFISTPSFNYTGRD

SEQ ID NO: 840 - protein, 39 aa, Homo sapiens
RQPQPVHLLPLHGIQHLNMVFSNLTLEHINAILLGAYRQ

SEQ ID NO: 841 - protein, 26 aa, Homo sapiens
KAELSNHTRPVILVPGCLGNQLEAKL

SEQ ID NO: 842 - protein, 25 aa, Homo sapiens
RVENTTVYYLVLDVQESDCSVLSRK

SEQ ID NO: 843 - protein, 21 aa, Homo sapiens
RVIDFNCTTSSVSSALANTKD

SEQ ID NO: 844 - protein, 16 aa, Homo sapiens
RHSHNNNSSDLHPHKH

SEQ ID NO: 845 - protein, 19 aa, Homo sapiens
MLGGYGHISSSIDINSSRK

SEQ ID NO: 846 - protein, 27 aa, Homo sapiens
RESVTDHVNLITPLEKPLQNFTLCFRA

SEQ ID NO: 847 - protein, 30 aa, Homo sapiens
RNPPMGGNVVIFDTVITNQEEPYQNHSGRF

SEQ ID NO: 848 - protein, 20 aa, Homo sapiens
RFSYSKNETYQLFLSYSSKK

SEQ ID NO: 849 - protein, 20 aa, Homo sapiens
RAVNITSENLIDDVVSLIRG

SEQ ID NO: 850 - protein, 21 aa, Homo sapiens
AVEFFNLTHLPANLLQGASKL

SEQ ID NO: 851 - protein, 15 aa, Homo sapiens
KLPPGLLANFTLLRT

SEQ ID NO: 852 - protein, 23 aa, Homo sapiens
RDGFDISGNPWICDQNLSDLYRW

SEQ ID NO: 853 - protein, 10 aa, Homo sapiens
KMFSQNDTRC

SEQ ID NO: 854 - protein, 33 aa, Homo sapiens
RQLDMLDLSNNSLASVPEGLWASLGQPNWDMRD

SEQ ID NO: 855 - protein, 17 aa, Homo sapiens
FLYNNHNYTDCTSEGRR

SEQ ID NO: 856 - protein, 22 aa, Homo sapiens
KLDAPTNLQFVNETDSTVLVRW

SEQ ID NO: 857 - protein, 20 aa, Homo sapiens
RDQCIVDDITYNVNDTFHKR

SEQ ID NO: 858 - protein, 15 aa, Homo sapiens
SPGLEYNVSVYTVKD

SEQ ID NO: 859 - protein, 18 aa, Homo sapiens
RHEEGHMLNCTCFGQGRG

SEQ ID NO: 860 - protein, 17 aa, Homo sapiens
TPPDNIQVQENFNISRI

SEQ ID NO: 861 - protein, 31 aa, Homo sapiens
RYFYNGTSMACETFQYGGCMGNGNNFVTEKE

SEQ ID NO: 862 - protein, 25 aa, Homo sapiens
KWNITMESYVVHTNYDEYAIFLTKK

SEQ ID NO: 863 - protein, 13 aa, Homo sapiens
ITNATLDQITGKW

SEQ ID NO: 864 - protein, 17 aa, Homo sapiens
RQDQCIYNTTYLNVQRE

SEQ ID NO: 865 - protein, 9 aa, Homo sapiens
RENGTISRY

SEQ ID NO: 866 - protein, 35 aa, Homo sapiens
MFVMGVNENDYNPGSMNIVSNASCTTNCLAPLAKV

SEQ ID NO: 867 - protein, 17 aa, Homo sapiens
KVCQDCPLLAPLNDTRV

SEQ ID NO: 868 - protein, 24 aa, Homo sapiens
KAALAAFNAQNNGSNFQLEEISRA

SEQ ID NO: 869 - protein, 25 aa, Homo sapiens
KALGISPFHEHAEVVFTANDSGPRR

SEQ ID NO: 870 - protein, 30 aa, Homo sapiens
KIILNALVAQQKNGSPAGGDAKELDSKSKG

SEQ ID NO: 871 - protein, 16 aa, Homo sapiens
KKNNLPFLTNVTLPRS

SEQ ID NO: 872 - protein, 27 aa, Homo sapiens
WNLNNDTEVPTASVAIEGASALNRVRW

SEQ ID NO: 873 - protein, 21 aa, Homo sapiens
KLAVDEEENADNNTKANVTKP

SEQ ID NO: 874 - protein, 19 aa, Homo sapiens
KDFEDLYTPVNGSIVIVRA

SEQ ID NO: 875 - protein, 15 aa, Homo sapiens
RKQNNGAFNETLFRN

SEQ ID NO: 876 - protein, 15 aa, Homo sapiens
KCGLVPVLAENYNKS

SEQ ID NO: 877 - protein, 23 aa, Homo sapiens
RQQQHLFGSNVTDCSGNFCLFRS

SEQ ID NO: 878 - protein, 36 aa, Homo sapiens
REDGDGDEDGPAQQLSGFNTNQSNNVLQAPLPPMRL

SEQ ID NO: 879 - protein, 27 aa, Homo sapiens
RQSLTSPDSQSARPANRTALSDPSSRL

SEQ ID NO: 880 - protein, 28 aa, Homo sapiens
MCQELETGIVDLLIPSPNATAEVGYNRD

SEQ ID NO: 881 - protein, 24 aa, Homo sapiens
RCSDGWSFDATTLDDNGTMLFFKG

SEQ ID NO: 882 - protein, 17 aa, Homo sapiens
KALPQPQNVTSLLGCTH

SEQ ID NO: 883 - protein, 15 aa, Homo sapiens
RSWPAVGNCSSALRW

SEQ ID NO: 884 - protein, 19 aa, Homo sapiens
RNGTGHGNSTHHGPEYMRC

SEQ ID NO: 885 - protein, 20 aa, Homo sapiens
AMNEPQCFYNESIAFFYNRS

SEQ ID NO: 886 - protein, 12 aa, Homo sapiens
KNLSDVNILHRL

SEQ ID NO: 887 - protein, 33 aa, Homo sapiens
RGYPGQVCANDSDTLELPDSSRALLLGWVPTRL

SEQ ID NO: 888 - protein, 26 aa, Homo sapiens
RAVFIQGAEEHPAAFCYQVNGSCPRT

SEQ ID NO: 889 - protein, 32 aa, Homo sapiens
RVEGLQGVYIATLINGSMNEENMRSVITFDKG

SEQ ID NO: 890 - protein, 13 aa, Homo sapiens
SLLCLPKANNSRS

SEQ ID NO: 891 - protein, 22 aa, Homo sapiens
LKRKWNSLSVIPVLNSSSYTKE

SEQ ID NO: 892 - protein, 36 aa, Homo sapiens
KELLLTLDDSFNDVGSDNSNQSSPRLRLPSPSMDKI

SEQ ID NO: 893 - protein, 13 aa, Homo sapiens
RSVNILFNLTHRV

SEQ ID NO: 894 - protein, 25 aa, Homo sapiens
FENLTYNQAASDSGSCGHVPVSPKA

SEQ ID NO: 895 - protein, 19 aa, Homo sapiens
QNFTTLEAAPSEAPDVWRI

SEQ ID NO: 896 - protein, 11 aa, Homo sapiens
KELLETVVNRT

SEQ ID NO: 897 - protein, 14 aa, Homo sapiens
KEGHFYYNISEVKV

SEQ ID NO: 898 - protein, 23 aa, Homo sapiens
RIYSNHSALESLALIPLQAPLKT

SEQ ID NO: 899 - protein, 14 aa, Homo sapiens
KVSNVSCQASVSRM

SEQ ID NO: 900 - protein, 18 aa, Homo sapiens
RGAFFPLTERNWSLPNRA

SEQ ID NO: 901 - protein, 33 aa, Homo sapiens
KVTELQLTSSELDFQPQQELMLQITNASLGLRF

SEQ ID NO: 902 - protein, 16 aa, Homo sapiens
RVDLEDFENNTAYAKY

SEQ ID NO: 903 - protein, 23 aa, Homo sapiens
RVGSSPKINVSPFYQNQTSTQRS

SEQ ID NO: 904 - protein, 23 aa, Homo sapiens
KVWKKIGIWNSNSGLNMTDSNKD

SEQ ID NO: 905 - protein, 29 aa, Homo sapiens
KDEGTYTCALHHSGHSPPISSQNVTVLRD

SEQ ID NO: 906 - protein, 31 aa, Homo sapiens
HNISVADSANYSCVYVDLKPPFGGSAPSERL

SEQ ID NO: 907 - protein, 35 aa, Homo sapiens
REGDHEFLEVPEAQEDVEATFPVHQPGNYSCSYRT

SEQ ID NO: 908 - protein, 22 aa, Homo sapiens
RFQSPAGTEALFELHNISVADS

SEQ ID NO: 909 - protein, 12 aa, Homo sapiens
LANVTLTCQARL

SEQ ID NO: 910 - protein, 35 aa, Homo sapiens
KMRMATPLLMQALPMGALPQGPMQNATKYGNMTED

SEQ ID NO: 911 - protein, 27 aa, Homo sapiens
RMATPLLMQALPMGALPQGPMQNATKY

SEQ ID NO: 912 - protein, 32 aa, Homo sapiens
RQFYVAAQGISWSYRPEPTNSSLNLSVTSFKK

SEQ ID NO: 913 - protein, 25 aa, Homo sapiens
KVSAITLVSATSTTANMTVGPEGKW

SEQ ID NO: 914 - protein, 34 aa, Homo sapiens
KNSVLNSSTAEHSSPYSEDPIEDPLQPDVTGIRL

SEQ ID NO: 915 - protein, 33 aa, Homo sapiens
KNMASRPYSIYPHGVTFSPYEDEVNSSFTSGRN

SEQ ID NO: 916 - protein, 20 aa, Homo sapiens
RTNINSSRDPDNIAAWYLRS

SEQ ID NO: 917 - protein, 33 aa, Homo sapiens
KTYEDDSPEWFKEDNAVQPNSSYTYVWHATERS

SEQ ID NO: 918 - protein, 18 aa, Homo sapiens
MDNVGTWMLTSMNSSPRS

SEQ ID NO: 919 - protein, 17 aa, Homo sapiens
RMEACMLNGTVIGPGKT

SEQ ID NO: 920 - protein, 29 aa, Homo sapiens
RTEPMQVALHCTNGSVVYHEVLNAMECKC

SEQ ID NO: 921 - protein, 25 aa, Homo sapiens
RHCDGNVSSCGDHPSEGCFCPPDKV

SEQ ID NO: 922 - protein, 24 aa, Homo sapiens
KTTCNPCPLGYKEENNTGECCGRC

SEQ ID NO: 923 - protein, 18 aa, Homo sapiens
KGQVYLQCGTPCNLTCRS

SEQ ID NO: 924 - protein, 23 aa, Homo sapiens
RGLQPTLTNPGECRPNFTCACRK

SEQ ID NO: 925 - protein, 21 aa, Homo sapiens
KWNCTDHVCDATCSTIGMAHY

SEQ ID NO: 926 - protein, 11 aa, Homo sapiens
RLDVDQALNRS

SEQ ID NO: 927 - protein, 22 aa, Homo sapiens
RSHEIWTHSCPQSPGNGTDASH

SEQ ID NO: 928 - protein, 38 aa, Homo sapiens
RTGGIGDSRPPSFHPNVASSRDGMDNETGTESMVSHRR

SEQ ID NO: 929 - protein, 27 aa, Homo sapiens
RTILENNSGRSNSNPFNKEELTAILKF

SEQ ID NO: 930 - protein, 21 aa, Homo sapiens
MGLNTSASTFQLTGFPGMEKA

SEQ ID NO: 931 - protein, 17 aa, Homo sapiens
KNWTAALFTGNLLLARD

SEQ ID NO: 932 - protein, 26 aa, Homo sapiens
KEATNTTSEPSAPSQDLLDLSPSPRM

SEQ ID NO: 933 - protein, 19 aa, Homo sapiens
KAMILLNSSMYPLVTATQD

SEQ ID NO: 934 - protein, 23 aa, Homo sapiens
KDMVVMLLSMLEGNVVNGTIGKQ

SEQ ID NO: 935 - protein, 26 aa, Homo sapiens
QKAMFDHLSYLLENSSVGLASPAMRG

SEQ ID NO: 936 - protein, 18 aa, Homo sapiens
MSYQLYNYPNKTLLFSKH

SEQ ID NO: 937 - protein, 35 aa, Homo sapiens
KVAGSEENGTAETEEVEDESASGELDLEAQFHLHF

SEQ ID NO: 938 - protein, 22 aa, Homo sapiens
KAENSAAVQINLSPTMLENVKK

SEQ ID NO: 939 - protein, 33 aa, Homo sapiens
REDFHYNDTAGYFIIGGSRYVAGIEGFFGPLKY

SEQ ID NO: 940 - protein, 23 aa, Homo sapiens
REQECEIISFAETGLSTINQTRL

SEQ ID NO: 941 - protein, 25 aa, Homo sapiens
RYDPFPAGDPEPRAAPNNSADPRVR

SEQ ID NO: 942 - protein, 26 aa, Homo sapiens
KKKPSMPNVSNDLSQKLYATMEKHKE

SEQ ID NO: 943 - protein, 30 aa, Homo sapiens
RNQQTILGSPASGIQNTIGSVGTGQQNATS

SEQ ID NO: 944 - protein, 29 aa, Homo sapiens
RMTQPMMNSSYHSNPAYMNQTAQYPMQMQ

SEQ ID NO: 945 - protein, 15 aa, Homo sapiens
NNYTAVFLGTVNGRL

SEQ ID NO: 946 - protein, 28 aa, Homo sapiens
RYTSAGISVTVKELFPAPVLNASVTSPL

SEQ ID NO: 947 - protein, 29 aa, Homo sapiens
KVADRTKSENGLQNESLSSTHHTDGLSKI

SEQ ID NO: 948 - protein, 14 aa, Homo sapiens
RNHETTNLSIQQKR

SEQ ID NO: 949 - protein, 18 aa, Homo sapiens
RFQAFANGSLLIPDFGKL

SEQ ID NO: 950 - protein, 29 aa, Homo sapiens
KSLDLSHNLISDFAWSDLHNLSALQLLKM

SEQ ID NO: 951 - protein, 14 aa, Homo sapiens
KGLNLTEDTYKPRI

SEQ ID NO: 952 - protein, 21 aa, Homo sapiens
KEPGSNVTMSVDAECVPMVRD

SEQ ID NO: 953 - protein, 16 aa, Homo sapiens
RTVIRPFYLTNSSGVD

SEQ ID NO: 954 - protein, 15 aa, Homo sapiens
RALGFENATQALGRA

SEQ ID NO: 955 - protein, 15 aa, Homo sapiens
KAAIPSALDTNSSKS

SEQ ID NO: 956 - protein, 13 aa, Homo sapiens
RDAGVVCTNETRS

SEQ ID NO: 957 - protein, 34 aa, Homo sapiens
RLLPILSQQSTINLSHNPLDCTCSNIHFLTWYKE

SEQ ID NO: 958 - protein, 16 aa, Homo sapiens
TFSRLMNLTFLDLTRC

SEQ ID NO: 959 - protein, 19 aa, Homo sapiens
KFLALVTMNQSGWGTSGRR

SEQ ID NO: 960 - protein, 30 aa, Homo sapiens
RGLDVEDVKFVINYDYPNSSEDYVHRIGRT

SEQ ID NO: 961 - protein, 18 aa, Homo sapiens
KNLLIFNLSEGDSGVYQC

SEQ ID NO: 962 - protein, 20 aa, Homo sapiens
RTLSDVPSAAPQNLSLEVRN

SEQ ID NO: 963 - protein, 27 aa, Homo sapiens
MAPMNQSQVLMSGSPLELNSLGEEQRI

SEQ ID NO: 964 - protein, 26 aa, Homo sapiens
KANYNLPIMVTDSGKPPMTNITDLRV

SEQ ID NO: 965 - protein, 18 aa, Homo sapiens
KINNTHALVSLLQNLNKA

SEQ ID NO: 966 - protein, 22 aa, Homo sapiens
KFDVNTSAVQVLIEHIGNLDRA

SEQ ID NO: 967 - protein, 28 aa, Homo sapiens
MACLMAAFSVGTAMNASSYSAEMTEPKS

SEQ ID NO: 968 - protein, 22 aa, Homo sapiens
MAVRGLIRPMNKSPMLITGIRC

SEQ ID NO: 969 - protein, 17 aa, Homo sapiens
RFRGNLSGKRVDFSGRT

SEQ ID NO: 970 - protein, 23 aa, Homo sapiens
RKDENESSAPADGEGGSELQPKN

SEQ ID NO: 971 - protein, 36 aa, Homo sapiens
KSSLLLAILGEMQTLEGKVHWSNVNESEPSFEATRS

SEQ ID NO: 972 - protein, 23 aa, Homo sapiens
KMNDSNSAGAGGPVKITENRSKK

SEQ ID NO: 973 - protein, 11 aa, Homo sapiens
RNLHQSNTSRA

SEQ ID NO: 974 - protein, 23 aa, Homo sapiens
IWCEDFLVRSFYLKNLQTNETRT

SEQ ID NO: 975 - protein, 24 aa, Homo sapiens
KAENSHSHSDYINASPIMDHDPRN

SEQ ID NO: 976 - protein, 29 aa, Homo sapiens
RCIPQSWVCDGDVDCTDGYDENQNCTRRT

SEQ ID NO: 977 - protein, 20 aa, Homo sapiens
KYDGSNRQTLVNTTHRPFDI

SEQ ID NO: 978 - protein, 21 aa, Homo sapiens
RHNLSLHSKFIKVHNEATGKS

SEQ ID NO: 979 - protein, 19 aa, Homo sapiens
RNAWGNQSYAELISQAIES

SEQ ID NO: 980 - protein, 40 aa, Homo sapiens
RDGTLEYAPVDITVNLDASGSQCGLHSPLQSDNATDSPKS

SEQ ID NO: 981 - protein, 39 aa, Homo sapiens
KIIKSLQKNGSVVAMTGDGVNDAVALKAADIGVAMGQTG

SEQ ID NO: 982 - protein, 27 aa, Homo sapiens
MALYHNISGVGLFLHPVGLELLLDHRA

SEQ ID NO: 983 - protein, 18 aa, Homo sapiens
RNTGNGTQSSMGSPLTRP

SEQ ID NO: 984 - protein, 27 aa, Homo sapiens
MAAQCVTKVALNVSCANLLDKDIGSKS

SEQ ID NO: 985 - protein, 32 aa, Homo sapiens
VHSDFTAAATRGAMAVIDGNVMAINPSEETKM

SEQ ID NO: 986 - protein, 33 aa, Homo sapiens
KIKGIVENMGINANNMSDFIMKVDALMSSVPKR

SEQ ID NO: 987 - protein, 22 aa, Homo sapiens
KMLAQKSGNIINMSSVASSVKG

SEQ ID NO: 988 - protein, 18 aa, Homo sapiens
KYLCIPAADSPSQNLTRH

SEQ ID NO: 989 - protein, 14 aa, Homo sapiens
KCLKNEYVENRTKS

SEQ ID NO: 990 - protein, 23 aa, Homo sapiens
MFNQDIEKLVEGEEVVRENETRL

SEQ ID NO: 991 - protein, 22 aa, Homo sapiens
KHFGEFFNLNQTVQSTIEDIKV

SEQ ID NO: 992 - protein, 23 aa, Homo sapiens
KLENSKNGTAGLIPSPELQEWRV

SEQ ID NO: 993 - protein, 18 aa, Homo sapiens
RRTEKLFFTILSPNQSKP

SEQ ID NO: 994 - protein, 16 aa, Homo sapiens
KYNVTVIQYIGELLRY

SEQ ID NO: 995 - protein, 28 aa, Homo sapiens
RLMPLEAGIPDPPNMSAELIQLKAKERH

SEQ ID NO: 996 - protein, 27 aa, Homo sapiens
PHMLPEDGANLSSARGILSLIQSSTRR

SEQ ID NO: 997 - protein, 10 aa, Homo sapiens
RNGTLVAFRG

SEQ ID NO: 998 - protein, 26 aa, Homo sapiens
KMTSTMPELNPTSRIAEAMLQTTTRP

SEQ ID NO: 999 - protein, 21 aa, Homo sapiens
KDNSSLNPLDRLISEDKKEKM

SEQ ID NO: 1000 - protein, 9 aa, Homo sapiens
RRQQSRNRS

SEQ ID NO: 1001 - protein, 22 aa, Homo sapiens
KIKNMNSTLTFVTLSGELRARR

SEQ ID NO: 1002 - protein, 21 aa, Homo sapiens
RQALLKQGQDNLSSVKETQKK

SEQ ID NO: 1003 - protein, 20 aa, Homo sapiens
KNIKHSGNITFDEIVNIARQ

SEQ ID NO: 1004 - protein, 14 aa, Homo sapiens
AKEAAGASKALNVT

SEQ ID NO: 1005 - protein, 19 aa, Homo sapiens
RVLAPILPDNFSTPTGSRT

SEQ ID NO: 1006 - protein, 20 aa, Homo sapiens
KTFTMMGPSESDNFSHNLRG

SEQ ID NO: 1007 - protein, 18 aa, Homo sapiens
MEPGNGSLDLGGDSAGRS

SEQ ID NO: 1008 - protein, 23 aa, Homo sapiens
KENEEFLIGFNITSKGRQLPKRR

SEQ ID NO: 1009 - protein, 34 aa, Homo sapiens
MDNPFEFNPEDPIPVSFSPVDTNSTSGDPVEKKD

SEQ ID NO: 1010 - protein, 28 aa, Homo sapiens
EAPMFTQPLVNTYAIAGYNATLNCSVRG

SEQ ID NO: 1011 - protein, 13 aa, Homo sapiens
RKWNVTSLETLKA

SEQ ID NO: 1012 - protein, 16 aa, Homo sapiens
MKMYSDAFLNDSYLKY

SEQ ID NO: 1013 - protein, 28 aa, Homo sapiens
RLQEMGFIIYGNENASVVPLLLYMPGKV

SEQ ID NO: 1014 - protein, 31 aa, Homo sapiens
REKTSLSANNATLEKQLIELTRTNELLKSKF

SEQ ID NO: 1015 - protein, 25 aa, Homo sapiens
RGLRGPNLTSPASITFTTGLEAPRD

SEQ ID NO: 1016 - protein, 14 aa, Homo sapiens
KNCRNKSLLRSRRT

SEQ ID NO: 1017 - protein, 34 aa, Homo sapiens
KRPETKLKPLPVAPSQPTLGSSNINGSIDYPAKN

SEQ ID NO: 1018 - protein, 18 aa, Homo sapiens
RKACKNCTCGLAEELEKE

SEQ ID NO: 1019 - protein, 15 aa, Homo sapiens
NYLNETQQLTQEIKA

SEQ ID NO: 1020 - protein, 22 aa, Homo sapiens
KTFSSMTCASGANVSEQLSLKL

SEQ ID NO: 1021 - protein, 25 aa, Homo sapiens
KKGCVLLSHLNETVTVSASLESGRE

SEQ ID NO: 1022 - protein, 27 aa, Homo sapiens
KGCVLLSHLNETVTVSASLESGRENRS

SEQ ID NO: 1023 - protein, 29 aa, Homo sapiens
RVIHLQFNNIASITDDTFCKANDTSYIRD

SEQ ID NO: 1024 - protein, 17 aa, Homo sapiens
MENLQTNFSLVQGSTKK

SEQ ID NO: 1025 - protein, 14 aa, Homo sapiens
MIFDFYKQNKTTRD

SEQ ID NO: 1026 - protein, 25 aa, Homo sapiens
KTANSSPIHFAGAQTSLPAFSPGRL

SEQ ID NO: 1027 - protein, 25 aa, Homo sapiens
KTLIPNASNEAIQLMTEMLNWDPKK

SEQ ID NO: 1028 - protein, 35 aa, Homo sapiens
MNRYTTMRQLGDGTYGSVLMGKSNESGELVAIKRM

SEQ ID NO: 1029 - protein, 16 aa, Homo sapiens
RFLGTSGQNVSDIFRY

SEQ ID NO: 1030 - protein, 35 aa, Homo sapiens
RSLHNLSTPEVPASVQTVTIESSVTVKIENKESRE

SEQ ID NO: 1031 - protein, 36 aa, Homo sapiens
MATFAGQIEENSNANTLVMILNATDADEPNNLNSKI

SEQ ID NO: 1032 - protein, 27 aa, Homo sapiens
KQENSSNSSPAPEPNSAVPSDGTEAKV

SEQ ID NO: 1033 - protein, 26 aa, Homo sapiens
KRKNSTSSTSNSSAGNNANSTGSKKK

SEQ ID NO: 1034 - protein, 27 aa, Homo sapiens
MMGMLASQQNQSGPSGNNQNQGNMQRE

SEQ ID NO: 1035 - protein, 18 aa, Homo sapiens
KELYEPIWQNFTDPQLRR

SEQ ID NO: 1036 - protein, 13 aa, Homo sapiens
LTFPNSSPGLRRQ

SEQ ID NO: 1037 - protein, 10 aa, Homo sapiens
KTLFCNASKE

SEQ ID NO: 1038 - protein, 27 aa, Homo sapiens
RLGHCPDPVLVNGEFSSSGPVNVSDKI

SEQ ID NO: 1039 - protein, 12 aa, Homo sapiens
KEWDNTTTECRL

SEQ ID NO: 1040 - protein, 33 aa, Homo sapiens
RDCDPPGNPVHGYFEGNNFTLGSTISYYCEDRY

SEQ ID NO: 1041 - protein, 28 aa, Homo sapiens
RGMNLTVFGGTVTAFLGIPYAQPPLGRL

SEQ ID NO: 1042 - protein, 20 aa, Homo sapiens
KYGNPNETQNNSTSWPVFKS

SEQ ID NO: 1043 - protein, 14 aa, Homo sapiens
RDNYTKAEEILSRS

SEQ ID NO: 1044 - protein, 11 aa, Homo sapiens
KWSDIWNATKY

SEQ ID NO: 1045 - protein, 10 aa, Homo sapiens
KDNNSIITRK

SEQ ID NO: 1046 - protein, 28 aa, Homo sapiens
KNATVLIWIYGGGFQTGTSSLHVYDGKF

SEQ ID NO: 1047 - protein, 10 aa, Homo sapiens
RENETEIIKC

SEQ ID NO: 1048 - protein, 22 aa, Homo sapiens
KVKNLTEEMAGLDETIAKLTKE

SEQ ID NO: 1049 - protein, 17 aa, Homo sapiens
RQAEEAEEQSNVNLSKF

SEQ ID NO: 1050 - protein, 17 aa, Homo sapiens
RENQSILITGESGAGKT

SEQ ID NO: 1051 - protein, 22 aa, Homo sapiens
RSVRKNLTYSCRSNQDCIINKH

SEQ ID NO: 1052 - protein, 15 aa, Homo sapiens
KLLLKIKNGTPPMRK

SEQ ID NO: 1053 - protein, 19 aa, Homo sapiens
MKNVSHNPLLLLTPQKVKR

SEQ ID NO: 1054 - protein, 23 aa, Homo sapiens
RIRTYNFTQDRVSDHRIAYEVRD

SEQ ID NO: 1055 - protein, 16 aa, Homo sapiens
NRNCILHLLSKNWSRR

SEQ ID NO: 1056 - protein, 26 aa, Homo sapiens
AETTLTQSPAFMSATPGDKVNISCKA

SEQ ID NO: 1057 - protein, 24 aa, Homo sapiens
KDSSGVIHVMLNGSEPTGAYPIKG

SEQ ID NO: 1058 - protein, 38 aa, Homo sapiens
MHGDETVGRELLLHLIDYLVTSDGKDPEITNLINSTRI

SEQ ID NO: 1059 - protein, 39 aa, Homo sapiens
KNQELKAGTSIMGSHLTSAETVTLDSLKAVEVVNLSVSC

SEQ ID NO: 1060 - protein, 18 aa, Homo sapiens
KLSTLLNHNNDTEEEERL

SEQ ID NO: 1061 - protein, 25 aa, Homo sapiens
DEAKNNITIFTRILDRLLDGYDNRL

SEQ ID NO: 1062 - protein, 20 aa, Homo sapiens
RSTEEPTAPASPQPPNDSRL

SEQ ID NO: 1063 - protein, 16 aa, Homo sapiens
ANRTGSVEAQTALKKR

SEQ ID NO: 1064 - protein, 25 aa, Homo sapiens
RLSYNVIPLNLTLDNRVADQLWVPD

SEQ ID NO: 1065 - protein, 22 aa, Homo sapiens
RFLITHNPTNATLSTFIEDLKK

SEQ ID NO: 1066 - protein, 23 aa, Homo sapiens
MYFFLANLSLADACFVSTTVPKM

SEQ ID NO: 1067 - protein, 20 aa, Homo sapiens
REQLSSANHSLQLASQIQKA

SEQ ID NO: 1068 - protein, 16 aa, Homo sapiens
QRYFVISNTTGYNDRA

SEQ ID NO: 1069 - protein, 17 aa, Homo sapiens
LEECCTHNNSATLSWKQ

SEQ ID NO: 1070 - protein, 14 aa, Homo sapiens
MILNSSTEDGIKRI

SEQ ID NO: 1071 - protein, 27 aa, Homo sapiens
KSHSNLSTKMSTLSYRPSDNVSSSTKK

SEQ ID NO: 1072 - protein, 22 aa, Homo sapiens
LDCPSSIIGMGLGNASTGYGKI

SEQ ID NO: 1073 - protein, 24 aa, Homo sapiens
MQRLNIGYVINVTTHLPLYHYEKG

SEQ ID NO: 1074 - protein, 24 aa, Homo sapiens
GDSSHCSNASTHSNQEAGPSNKRT

SEQ ID NO: 1075 - protein, 21 aa, Homo sapiens
FEAFQDALNQETTYVSNLTRS

SEQ ID NO: 1076 - protein, 17 aa, Homo sapiens
MSACNISIQGPSIYNKE

SEQ ID NO: 1077 - protein, 19 aa, Homo sapiens
RYFCLAANDQNNVTIMANL

SEQ ID NO: 1078 - protein, 18 aa, Homo sapiens
KINPKNYTENELEKITRR

SEQ ID NO: 1079 - protein, 18 aa, Homo sapiens
RMDKPANCTHDLYMIMRE

SEQ ID NO: 1080 - protein, 13 aa, Homo sapiens
REGVQLNLSFIRP

SEQ ID NO: 1081 - protein, 22 aa, Homo sapiens
VNALNFSVNYSEDFVELNAARY

SEQ ID NO: 1082 - protein, 41 aa, Homo sapiens
RGSHAGNLTVAVVLPLANTSYPWSWARVGPAVELALAQVKA

SEQ ID NO: 1083 - protein, 34 aa, Homo sapiens
KIHQGTLTILSLNSSLLGYYQCLANNSIGAIVSG

SEQ ID NO: 1084 - protein, 24 aa, Homo sapiens
KAATCINPLNGSVCERPANHSAKQ

SEQ ID NO: 1085 - protein, 32 aa, Homo sapiens
RYLHTAVIVSGTMLVFGGNTHNDTSMSHGAKC

SEQ ID NO: 1086 - protein, 17 aa, Homo sapiens
KAATCINPLNGSVCERP

SEQ ID NO: 1087 - protein, 28 aa, Homo sapiens
KMPSQAPTGNFYPQPLLNSSMCLEDSRY

SEQ ID NO: 1088 - protein, 19 aa, Homo sapiens
KISNSSDTVECECSENWKG

SEQ ID NO: 1089 - protein, 17 aa, Homo sapiens
RVFHIHNESWVLLTPKA

SEQ ID NO: 1090 - protein, 14 aa, Homo sapiens
KIDSTGNVTNELRV

SEQ ID NO: 1091 - protein, 15 aa, Homo sapiens
RNHSCSEGQISIFRY

SEQ ID NO: 1092 - protein, 20 aa, Homo sapiens
RYNWSFIHCPACQCNGHSKC

SEQ ID NO: 1093 - protein, 11 aa, Homo sapiens
RGICNSSDVRG

SEQ ID NO: 1094 - protein, 21 aa, Homo sapiens
RNHPNITFFVYVSNFTWPIKI

SEQ ID NO: 1095 - protein, 11 aa, Homo sapiens
KCINQSICEKC

SEQ ID NO: 1096 - protein, 28 aa, Homo sapiens
RGCSCFSDWQGPGCSVPVPANQSFWTRE

SEQ ID NO: 1097 - protein, 34 aa, Homo sapiens
KAVVNGNIMWVVGGYMFNHSDYNMVLAYDLASRE

SEQ ID NO: 1098 - protein, 19 aa, Homo sapiens
KCINQSICEKCENLTTGKH

SEQ ID NO: 1099 - protein, 33 aa, Homo sapiens
QRHAAEIANMSLDILSAVGTFRMRHMPEVPVRI

SEQ ID NO: 1100 - protein, 39 aa, Homo sapiens
KNNSPGTAEGCGGGGGGGGGGGSGGSGGGGGGGGGGDKS

SEQ ID NO: 1101 - protein, 29 aa, Homo sapiens
RLGSTFSLDTSMSMNSSPLVGPECDHPKI

SEQ ID NO: 1102 - protein, 13 aa, Homo sapiens
RVNSTELFHVDRH

SEQ ID NO: 1103 - protein, 16 aa, Homo sapiens
RALLTNVSSVALGSRR

SEQ ID NO: 1104 - protein, 18 aa, Homo sapiens
REVQGNESDLFMSYFPRG

SEQ ID NO: 1105 - protein, 19 aa, Homo sapiens
RTVYLYPNQTGLPDPLSRH

SEQ ID NO: 1106 - protein, 22 aa, Homo sapiens
RISALGLPTNLTHILLFGMGRG

SEQ ID NO: 1107 - protein, 30 aa, Homo sapiens
RNLSSLESVQLDHNQLETLPGDVFGALPRL

SEQ ID NO: 1108 - protein, 16 aa, Homo sapiens
KLLDLSGNNLTHLPKG

SEQ ID NO: 1109 - protein, 19 aa, Homo sapiens
RLQLSNGNMTLTLLSVKRN

SEQ ID NO: 1110 - protein, 20 aa, Homo sapiens
GQTCNCSTGSLSDIQPCLRE

SEQ ID NO: 1111 - protein, 26 aa, Homo sapiens
KLEESYTLNSDLARLGVQDLFNSSKA

SEQ ID NO: 1112 - protein, 25 aa, Homo sapiens
LWLALDYVVSNASVMNLLIISFDRY

SEQ ID NO: 1113 - protein, 18 aa, Homo sapiens
MANFTPVNGSSGNQSVRL

SEQ ID NO: 1114 - protein, 27 aa, Homo sapiens
KAVLQLNEEGVDTAGSTGVTLNLTSKP

SEQ ID NO: 1115 - protein, 16 aa, Homo sapiens
RAQLLQGLGFNLTERS

SEQ ID NO: 1116 - protein, 15 aa, Homo sapiens
DPNAAYVNMSNHHRG

SEQ ID NO: 1117 - protein, 32 aa, Homo sapiens
KVTISGVYDLGDVLEEMGIADLFTNQANFSRI

SEQ ID NO: 1118 - protein, 16 aa, Homo sapiens
NYVGNGTVFFILPDKG

SEQ ID NO: 1119 - protein, 16 aa, Homo sapiens
KDASSFLAEWQNITKG

SEQ ID NO: 1120 - protein, 15 aa, Homo sapiens
KSLVTQYLNATGNRW

SEQ ID NO: 1121 - protein, 12 aa, Homo sapiens
RAFGSNPNLTKV

SEQ ID NO: 1122 - protein, 23 aa, Homo sapiens
KLYLGSNNLTALHPALFQNLSKL

SEQ ID NO: 1123 - protein, 21 aa, Homo sapiens
RNAITHLPLSIFASLGNLTFL

SEQ ID NO: 1124 - protein, 19 aa, Homo sapiens
RQGSLGLQYNASQEWDLRR

SEQ ID NO: 1125 - protein, 12 aa, Homo sapiens
NIFSNLTSLGKL

SEQ ID NO: 1126 - protein, 19 aa, Homo sapiens
KLGYNANTSILSFQAVCRE

SEQ ID NO: 1127 - protein, 21 aa, Homo sapiens
KFVQGNSTEVACHPGYGLPKA

SEQ ID NO: 1128 - protein, 17 aa, Homo sapiens
RSTLITVLNISEIESRF

SEQ ID NO: 1129 - protein, 29 aa, Homo sapiens
KWNGSVIDEDDPVLGEDYYSVENPANKRR

SEQ ID NO: 1130 - protein, 17 aa, Homo sapiens
KSISWDENGTCIVINEE

SEQ ID NO: 1131 - protein, 18 aa, Homo sapiens
MASNVTNKMDPHSMNSRV

SEQ ID NO: 1132 - protein, 26 aa, Homo sapiens
RNTEASSEEESSASRMQVEQNLSDHI

SEQ ID NO: 1133 - protein, 14 aa, Homo sapiens
RSNSSAANLMAKKR

SEQ ID NO: 1134 - protein, 38 aa, Homo sapiens
AASSIWSPASISPGSAPASVSVPEPLAAPSNTSCMQRS

SEQ ID NO: 1135 - protein, 28 aa, Homo sapiens
RGCASTGVIMSVNNSLYLGPILKFGSKE

SEQ ID NO: 1136 - protein, 37 aa, Homo sapiens
RNGSANRNSSHRTAAQPAETPEDVPGSLDDGADCEAV

SEQ ID NO: 1137 - protein, 16 aa, Homo sapiens
KMLSLNNYSVPQSTRE

SEQ ID NO: 1138 - protein, 31 aa, Homo sapiens
MNNPSETSKPSMESGDGNTGTQTNGLDFQKQ

SEQ ID NO: 1139 - protein, 26 aa, Homo sapiens
KKQPFSSASSQNGSLSPHYLSSVIKQ

SEQ ID NO: 1140 - protein, 19 aa, Homo sapiens
RYRCNDTIPEDYETHQLRQ

SEQ ID NO: 1141 - protein, 31 aa, Homo sapiens
RCGPCPAGFTGNGSHCTDVNECNAHPCFPRV

SEQ ID NO: 1142 - protein, 14 aa, Homo sapiens
RIYNVTYLEPSLRI

SEQ ID NO: 1143 - protein, 26 aa, Homo sapiens
KGTGNDTVLNVALLNVISNQECNIKH

SEQ ID NO: 1144 - protein, 17 aa, Homo sapiens
RAAYNVTLLNFMDPQKM

SEQ ID NO: 1145 - protein, 28 aa, Homo sapiens
RVFYFMVGTAFANSTCQLIVCQMSSTRC

SEQ ID NO: 1146 - protein, 26 aa, Homo sapiens
RNGESMLNASLVNASSLSEAEQLQRE

SEQ ID NO: 1147 - protein, 23 aa, Homo sapiens
KTAFITNFTLTIDGVTYPGNVKE

SEQ ID NO: 1148 - protein, 15 aa, Homo sapiens
KNAHGEEKENLTARA

SEQ ID NO: 1149 - protein, 27 aa, Homo sapiens
KNLDLILPTLRNYTVINSKIIVVTIRP

SEQ ID NO: 1150 - protein, 19 aa, Homo sapiens
RFRDIPNTSSMENPAPNKN

SEQ ID NO: 1151 - protein, 26 aa, Homo sapiens
KKDLSCSNFSLLAYQFDHFSHEKIKD

SEQ ID NO: 1152 - protein, 21 aa, Homo sapiens
MFPKNFTNCTWTLENPDPTKY

SEQ ID NO: 1153 - protein, 21 aa, Homo sapiens
NFGHNDSTSQMSLNSAAVTKT

SEQ ID NO: 1154 - protein, 17 aa, Homo sapiens
RMCQAGNATVKQSRYRI

SEQ ID NO: 1155 - protein, 23 aa, Homo sapiens
KKFLYNFTQIPHLAGTEQNFQLA

SEQ ID NO: 1156 - protein, 15 aa, Homo sapiens
RKMPSNQNVSPSQRD

SEQ ID NO: 1157 - protein, 23 aa, Homo sapiens
IQAAASTPTNATAASDANTGDRG

SEQ ID NO: 1158 - protein, 22 aa, Homo sapiens
KNFHSMQNLCPPQTNGTPEGRQ

SEQ ID NO: 1159 - protein, 28 aa, Homo sapiens
KSCVSNIESTLSALQYVSSIVVSLENRS

SEQ ID NO: 1160 - protein, 19 aa, Homo sapiens
ILESLMCNESSMQSLRQRK

SEQ ID NO: 1161 - protein, 30 aa, Homo sapiens
KDGKNKTDKKDHSNIGNDSKKTDGTKQRSH

SEQ ID NO: 1162 - protein, 34 aa, Homo sapiens
RERESFLAPSSGVQPTLAMPNIAVGQNVTVTERV

SEQ ID NO: 1163 - protein, 20 aa, Homo sapiens
DKMIENHNISTPFSCQFCKE

SEQ ID NO: 1164 - protein, 37 aa, Homo sapiens
MSNVEQALFARLLLQDPGNHLINMTSSTTLNLSADRD

SEQ ID NO: 1165 - protein, 30 aa, Homo sapiens
KLIPFSPAVNTSVSTVASTVAPMYAGDLRT

SEQ ID NO: 1166 - protein, 24 aa, Homo sapiens
KTRGRGAANDSTQFTVAGRMVKKG

SEQ ID NO: 1167 - protein, 17 aa, Homo sapiens
CIIQMQGNSTSIINPKN

SEQ ID NO: 1168 - protein, 36 aa, Homo sapiens
RRGGRFSAQGMGTFNPADYAEPANTDDNYGNSSGNT

SEQ ID NO: 1169 - protein, 22 aa, Homo sapiens
RFTLTQSEADADILFNFSHFKD

SEQ ID NO: 1170 - protein, 21 aa, Homo sapiens
KEGYSNISYIVVNHQGISSRL

SEQ ID NO: 1171 - protein, 27 aa, Homo sapiens
KVSEHIPVYQQEENQTDVWTLLNGSKD

SEQ ID NO: 1172 - protein, 12 aa, Homo sapiens
KCGNCSLTTLKD

SEQ ID NO: 1173 - protein, 25 aa, Homo sapiens
RDQDPMLNSNGSVTVVALLQASCYL

SEQ ID NO: 1174 - protein, 21 aa, Homo sapiens
RFQGNDTSPESFLLHNALARK

SEQ ID NO: 1175 - protein, 28 aa, Homo sapiens
KWYLENVYPEMRVYNNTLTYGEVRNSKA

SEQ ID NO: 1176 - protein, 31 aa, Homo sapiens
KCEQSYGTNSSDESGSFSEADSESCPVQDRG

SEQ ID NO: 1177 - protein, 12 aa, Homo sapiens
RCFLGNGTGYRG

SEQ ID NO: 1178 - protein, 23 aa, Homo sapiens
KYIPYTLYSVFNPSDHDLVLIRL

SEQ ID NO: 1179 - protein, 16 aa, Homo sapiens
RDSVSVVLGQHFFNRT

SEQ ID NO: 1180 - protein, 12 aa, Homo sapiens
RLRNVSWATGRS

SEQ ID NO: 1181 - protein, 24 aa, Homo sapiens
RCMWSSALNSLNLSFAGLEQVPKG

SEQ ID NO: 1182 - protein, 36 aa, Homo sapiens
KSPMQWDNSSNAGFSEASNTWLPTNSDYHTVNVDVQ

SEQ ID NO: 1183 - protein, 29 aa, Homo sapiens
MVSNESVDYRATFPEDQFPNSSQNGSCRQ

SEQ ID NO: 1184 - protein, 18 aa, Homo sapiens
RHVFPHNHTADIQSEVHC

SEQ ID NO: 1185 - protein, 27 aa, Homo sapiens
KRNTELETLLAKLIQTCQHVEVNASRQ

SEQ ID NO: 1186 - protein, 16 aa, Homo sapiens
RNMANGQPHSVNITRH

SEQ ID NO: 1187 - protein, 32 aa, Homo sapiens
RIDSQLHTPMYFFLANLSFVDVCNSTTITPKM

SEQ ID NO: 1188 - protein, 20 aa, Homo sapiens
KSVTIQAPGEPLLDNESTRG

SEQ ID NO: 1189 - protein, 23 aa, Homo sapiens
MESYDVIANQPVVIDNGSGVIKA

SEQ ID NO: 1190 - protein, 20 aa, Homo sapiens
RNVTSNDEVLFNVTVTMKKC

SEQ ID NO: 1191 - protein, 29 aa, Homo sapiens
MLRNSTDTTPLTGPGTPESTTVEPAARRS

SEQ ID NO: 1192 - protein, 31 aa, Homo sapiens
MNKAGAVMHSGMQINMQAKQNSSKTTSKRRG

SEQ ID NO: 1193 - protein, 33 aa, Homo sapiens
RFHNHTTHMSLVGTFPWMAPEVIQSLPVSETCD

SEQ ID NO: 1194 - protein, 28 aa, Homo sapiens
KAVVVFDEAHNIDNVCIDSMSVNLTRRT

SEQ ID NO: 1195 - protein, 20 aa, Homo sapiens
KIPCSQPPQIEHGTINSSRS

SEQ ID NO: 1196 - protein, 15 aa, Homo sapiens
RISEENETTCYMGKW

SEQ ID NO: 1197 - protein, 15 aa, Homo sapiens
KSPDVINGSPISQKI

SEQ ID NO: 1198 - protein, 15 aa, Homo sapiens
KMDGASNVTCINSRW

SEQ ID NO: 1199 - protein, 36 aa, Homo sapiens
RWDPEVNCSMAQIQLCPPPPQIPNSHNMTTTLNYRD

SEQ ID NO: 1200 - protein, 27 aa, Homo sapiens
RSPYEMFGDEEVMCLNGNWTEPPQCKD

SEQ ID NO: 1201 - protein, 12 aa, Homo sapiens
KLNDTLDYECHD

SEQ ID NO: 1202 - protein, 22 aa, Homo sapiens
YYYGDSVEFNCSESFTMIGHRS

SEQ ID NO: 1203 - protein, 12 aa, Homo sapiens
KGTEWLVNSSRI

SEQ ID NO: 1204 - protein, 28 aa, Homo sapiens
KGTEWLVNSSRILIWEDGSLEINNITRN

SEQ ID NO: 1205 - protein, 14 aa, Homo sapiens
KINNSTNEGMNVKK

SEQ ID NO: 1206 - protein, 24 aa, Homo sapiens
RRSNVSSPATPTASSSSSTTPTRK

SEQ ID NO: 1207 - protein, 14 aa, Homo sapiens
HLALGAQNHTLQRL

SEQ ID NO: 1208 - protein, 14 aa, Homo sapiens
KVSKNDTEEESNKS

SEQ ID NO: 1209 - protein, 20 aa, Homo sapiens
RLHVGNYNGTAGDALRFNKH

SEQ ID NO: 1210 - protein, 26 aa, Homo sapiens
RGQGTASSGNVSDLAQTVKTFDNLKT

SEQ ID NO: 1211 - protein, 26 aa, Homo sapiens
RGPSHPLDLGTSSPNTSQIHWTPYRA

SEQ ID NO: 1212 - protein, 27 aa, Homo sapiens
KEQQPNDLLSVQFIDYGNVSVVHTNKI

SEQ ID NO: 1213 - protein, 34 aa, Homo sapiens
TTDFCSVSTATPVPTANSTAKPTVQPSPSTTSKT

SEQ ID NO: 1214 - protein, 20 aa, Homo sapiens
KTNLIVNYLPQNMTQEELKS

SEQ ID NO: 1215 - protein, 35 aa, Homo sapiens
REITASSAVSILIKPEQETDPLPVVSRNVSADAKC

SEQ ID NO: 1216 - protein, 19 aa, Homo sapiens
KLQESIEYEDLGKNNSVKT

SEQ ID NO: 1217 - protein, 17 aa, Homo sapiens
RLNVNATDSSSTSNHKQ

SEQ ID NO: 1218 - protein, 16 aa, Homo sapiens
MRSFLQQDVNKTKSRL

SEQ ID NO: 1219 - protein, 24 aa, Homo sapiens
REPSDPTSNRSTFHPGDSQKPVKR

SEQ ID NO: 1220 - protein, 24 aa, Homo sapiens
KQTDVINASWWVMSNKTRDELERS

SEQ ID NO: 1221 - protein, 24 aa, Homo sapiens
KRNSSSSSTDSETLRYNHNFEPKS

SEQ ID NO: 1222 - protein, 30 aa, Homo sapiens
KLPLSHSALPSQALGGIASGLGMQNLNSSR

SEQ ID NO: 1223 - protein, 29 aa, Homo sapiens
RNNPVIQSSTTTNTTTTTTTTTSNTTHRV

SEQ ID NO: 1224 - protein, 22 aa, Homo sapiens
RGNEATEGSGLLLNSTGDLMKK

SEQ ID NO: 1225 - protein, 8 aa, Homo sapiens
RFLLYNRS

SEQ ID NO: 1226 - protein, 25 aa, Homo sapiens
KTELFSSSCPGGIMLNETGQGYQRF

SEQ ID NO: 1227 - protein, 29 aa, Homo sapiens
KFQDLLSEENESTALPQVLAQPSTSRKRP

SEQ ID NO: 1228 - protein, 14 aa, Homo sapiens
KLSSQGNVSGKRKN

SEQ ID NO: 1229 - protein, 32 aa, Homo sapiens
RDVLQNHLTEVLTLVAMELPHNVSSAEAVLRH

SEQ ID NO: 1230 - protein, 12 aa, Homo sapiens
KKLNCSPDSFRC

SEQ ID NO: 1231 - protein, 21 aa, Homo sapiens
KEDGKTLYANTINGSGLAIDR

SEQ ID NO: 1232 - protein, 35 aa, Homo sapiens
KLLLSQLDSHPSHSAVVNWTSYASSIEALSSGNKE

SEQ ID NO: 1233 - protein, 15 aa, Homo sapiens
KLTGVAGNYTVCQKD

SEQ ID NO: 1234 - protein, 19 aa, Homo sapiens
IMYPIAVMGNITIILMSRL

SEQ ID NO: 1235 - protein, 25 aa, Homo sapiens
KVAKNAQNINPSSSQNSQNFATYKE

SEQ ID NO: 1236 - protein, 38 aa, Homo sapiens
MVVTLTELPSGNDTSGLENKTVVVTTILESPYVMMKKN

SEQ ID NO: 1237 - protein, 28 aa, Homo sapiens
RIVAECNAVRQALQDLLSEYMNNTGRKE

SEQ ID NO: 1238 - protein, 28 aa, Homo sapiens
KKNATMLYTASQAFLRHPDVAATRANRD

SEQ ID NO: 1239 - protein, 33 aa, Homo sapiens
KFIENIGYVLYGVYNVTMVVVLLNMLIAMINNS

SEQ ID NO: 1240 - protein, 26 aa, Homo sapiens
KTRYQAGMRNSENLTANNTLSKPTRY

SEQ ID NO: 1241 - protein, 24 aa, Homo sapiens
RLVKVKNEGDDFGWGVVVNFSKKS

SEQ ID NO: 1242 - protein, 27 aa, Homo sapiens
KEEDFMQLSPQELISVISNDSLNVEKE

SEQ ID NO: 1243 - protein, 17 aa, Homo sapiens
KNVSQENMCSASAAFKS

SEQ ID NO: 1244 - protein, 23 aa, Homo sapiens
MVAGLLNSGNSNKTIHTSSSIKL

SEQ ID NO: 1245 - protein, 37 aa, Homo sapiens
KNMLVLNLSHNSIDTIPNQLFINLTDLLYLDLSENRL

SEQ ID NO: 1246 - protein, 17 aa, Homo sapiens
MMNNTDFLMLNNPWNKL

SEQ ID NO: 1247 - protein, 11 aa, Homo sapiens
ENITIVDISRK

SEQ ID NO: 1248 - protein, 9 aa, Homo sapiens
RIVNDTYRT

SEQ ID NO: 1249 - protein, 16 aa, Homo sapiens
RAGPNGTLFVADAYKG

SEQ ID NO: 1250 - protein, 36 aa, Homo sapiens
RRSLEQHGLPWAIISIPVNVTSIPTFELLQPPWTFW

SEQ ID NO: 1251 - protein, 16 aa, Homo sapiens
RSVQLHDSGNYSCYRA

SEQ ID NO: 1252 - protein, 20 aa, Homo sapiens
AVAAGTPNTSGSIHENPPKA

SEQ ID NO: 1253 - protein, 17 aa, Homo sapiens
RFANLTPEEFVGDYWRN

SEQ ID NO: 1254 - protein, 25 aa, Homo sapiens
VENLIILANNSLSSNGNVTESGCKE

SEQ ID NO: 1255 - protein, 29 aa, Homo sapiens
KSTKPIVAAINGSCLGGGLEVAISCQYRI

SEQ ID NO: 1256 - protein, 25 aa, Homo sapiens
KNATLVSPPAQTINQTPVTLQVPGL

SEQ ID NO: 1257 - protein, 12 aa, Homo sapiens
RCNSSLSNHQRI

SEQ ID NO: 1258 - protein, 20 aa, Homo sapiens
RTASIWVPPLQERNSSWDRI

SEQ ID NO: 1259 - protein, 27 aa, Homo sapiens
LGDQMLNATVMNHGDTLTATATATARA

SEQ ID NO: 1260 - protein, 32 aa, Homo sapiens
RENLTVFSFLGPIVNLSEPTAHEGSTVTVSCM

SEQ ID NO: 1261 - protein, 17 aa, Homo sapiens
RYVKTTGNATVDHLSKY

SEQ ID NO: 1262 - protein, 15 aa, Homo sapiens
KLNYLPPNASALFRK

SEQ ID NO: 1263 - protein, 32 aa, Homo sapiens
KCVPVTLWHLGYWLCYVNSTVNPICYALCNRT

SEQ ID NO: 1264 - protein, 37 aa, Homo sapiens
MSAAAMGSGSGNMSAGSMNMSSYVGAGMSPSLAGMSP

SEQ ID NO: 1265 - protein, 17 aa, Homo sapiens
RPTLLNDTGNYTCMLRN

SEQ ID NO: 1266 - protein, 29 aa, Homo sapiens
EGEKGAEAANVTGPDGVPVEGSRYAADRR

SEQ ID NO: 1267 - protein, 25 aa, Homo sapiens
KIFQIYKGNFTGSVEPEPSTLTPRT

SEQ ID NO: 1268 - protein, 21 aa, Homo sapiens
KDFLDVYYNLTLKTMMGIEWV

SEQ ID NO: 1269 - protein, 18 aa, Homo sapiens
KINRTLETANCMSSQTKN

SEQ ID NO: 1270 - protein, 15 aa, Homo sapiens
AMIQFAINSTERKRM

SEQ ID NO: 1271 - protein, 18 aa, Homo sapiens
KLGACNDTLQQLMEVFKF

SEQ ID NO: 1272 - protein, 21 aa, Homo sapiens
KSLTFNETYQDISELVYGAKL

SEQ ID NO: 1273 - protein, 11 aa, Homo sapiens
KWVSNKTEGRI

SEQ ID NO: 1274 - protein, 23 aa, Homo sapiens
RLALTPAHLLFTADNHTEPAARF

SEQ ID NO: 1275 - protein, 14 aa, Homo sapiens
KKLINDYVKNGTRG

SEQ ID NO: 1276 - protein, 17 aa, Homo sapiens
NSPLDEENLTQENQDRG

SEQ ID NO: 1277 - protein, 18 aa, Homo sapiens
KYTGNASALFILPDQDKM

SEQ ID NO: 1278 - protein, 36 aa, Homo sapiens
KALDKNVIFSPLSISTALAFLSLGAHNTTLTEILKA

SEQ ID NO: 1279 - protein, 23 aa, Homo sapiens
RVYIHPFHLVIHNESTCEQLAKA

SEQ ID NO: 1280 - protein, 19 aa, Homo sapiens
RLQAILGVPWKDKNCTSRL

SEQ ID NO: 1281 - protein, 34 aa, Homo sapiens
KGFSLLAEPQEFWVDNSTSVSVPMLSGMGTFQHW

SEQ ID NO: 1282 - protein, 37 aa, Homo sapiens
RGNEANYYSNATTDEHGLVQFSINTTNVMGTSLTVRV

SEQ ID NO: 1283 - protein, 21 aa, Homo sapiens
KVSNQTLSLFFTVLQDVPVRD

SEQ ID NO: 1284 - protein, 34 aa, Homo sapiens
KSLGNVNFTVSAEALESQELCGTEVPSVPEHGRK

SEQ ID NO: 1285 - protein, 24 aa, Homo sapiens
KGCVLLSYLNETVTVSASLESVRG

SEQ ID NO: 1286 - protein, 23 aa, Homo sapiens
KIITILEEEMNVSVCGLYTYGKP

SEQ ID NO: 1287 - protein, 18 aa, Homo sapiens
YVLDYLNETQQLTPEVKS

SEQ ID NO: 1288 - protein, 27 aa, Homo sapiens
KGCVLLSYLNETVTVSASLESVRGNRS

SEQ ID NO: 1289 - protein, 32 aa, Homo sapiens
RNPSDPMPQAPALWIETTAYALLHLLLHEGKA

SEQ ID NO: 1290 - protein, 13 aa, Homo sapiens
RGLNVTLSSTGRN

SEQ ID NO: 1291 - protein, 25 aa, Homo sapiens
RFEQLELRPVLYNYLDKNLTVSVHV

SEQ ID NO: 1292 - protein, 18 aa, Homo sapiens
RFSDGLESNSSTQFEVKK

SEQ ID NO: 1293 - protein, 16 aa, Homo sapiens
KNTTCQDLQIEVTVKG

SEQ ID NO: 1294 - protein, 35 aa, Homo sapiens
KVEGSSSHLVTFTVLPLEIGLHNINFSLETWFGKE

SEQ ID NO: 1295 - protein, 14 aa, Homo sapiens
RANISHKDMQLGRL

SEQ ID NO: 1296 - protein, 8 aa, Homo sapiens
KYNFSFRY

SEQ ID NO: 1297 - protein, 17 aa, Homo sapiens
KFVGTPEVNQTTLYQRY

SEQ ID NO: 1298 - protein, 16 aa, Homo sapiens
RILTNFTGVMPPQFKK

SEQ ID NO: 1299 - protein, 14 aa, Homo sapiens
RITYSIVQTNCSKE

SEQ ID NO: 1300 - protein, 14 aa, Homo sapiens
KLNAENNATFYFKI

SEQ ID NO: 1301 - protein, 17 aa, Homo sapiens
KYNSQNQSNNQFVLYRI

SEQ ID NO: 1302 - protein, 24 aa, Homo sapiens
RHGIQYFNNNTQHSSLFMLNEVKR

SEQ ID NO: 1303 - protein, 19 aa, Homo sapiens
RVYVNISHPDMVDFARGKT

SEQ ID NO: 1304 - protein, 32 aa, Homo sapiens
RDDNMNTSEDEDMFPIEMSSDEAMELLESSRT

SEQ ID NO: 1305 - protein, 13 aa, Homo sapiens
KLMQNSTSPPLKL

SEQ ID NO: 1306 - protein, 32 aa, Homo sapiens
MIQTAHVGVGISGNEGLQAANSSDYSIAQFKY

SEQ ID NO: 1307 - protein, 39 aa, Homo sapiens
RYGEQGLREGSGGGGGMDDIFSHIFGGGLFGFMGNQSRS

SEQ ID NO: 1308 - protein, 30 aa, Homo sapiens
KNAKSSGNSSSSGSGSGSTSAGSSSPGARR

SEQ ID NO: 1309 - protein, 25 aa, Homo sapiens
KNYTSVYDKNNLLTNKTVMAHGCYL

SEQ ID NO: 1310 - protein, 32 aa, Homo sapiens
KLREQVNSMVDISKMHMILYDLQQNLSSSHRA

SEQ ID NO: 1311 - protein, 18 aa, Homo sapiens
RCDKDSMPDGNLSEEEKL

SEQ ID NO: 1312 - protein, 20 aa, Homo sapiens
MNWVVGSADLEIINATTGRR

SEQ ID NO: 1313 - protein, 37 aa, Homo sapiens
AQPIEPITAAPSGSGNGSGSSSSGGSSGGSGFCAVRA

SEQ ID NO: 1314 - protein, 19 aa, Homo sapiens
RVKNISDADVHNAMDNYEC

SEQ ID NO: 1315 - protein, 22 aa, Homo sapiens
RKFAMSPSNFSSSDCQDEEGRK

SEQ ID NO: 1316 - protein, 28 aa, Homo sapiens
WGKELIETLWNLGDHELLHMYPGNVSKL

SEQ ID NO: 1317 - protein, 23 aa, Homo sapiens
KMVAWSSSENMSEESVVLSFPRF

SEQ ID NO: 1318 - protein, 28 aa, Homo sapiens
KTFVEVDENGTQAAAATGAVVSERSLRS

SEQ ID NO: 1319 - protein, 15 aa, Homo sapiens
KSEVNEMENNLTRRR

SEQ ID NO: 1320 - protein, 26 aa, Homo sapiens
AEAYLGYPVTNAVITVPAYFNDSQRQ

SEQ ID NO: 1321 - protein, 20 aa, Homo sapiens
KSLTNLSQEEQITKLLILKL

SEQ ID NO: 1322 - protein, 24 aa, Homo sapiens
KATFVKVVPTPNNGSTELVALHRN

SEQ ID NO: 1323 - protein, 18 aa, Homo sapiens
MASTFIGNSTAIQELFKR

SEQ ID NO: 1324 - protein, 24 aa, Homo sapiens
LENSGRSKNFSYNLQSATQPKNKT

SEQ ID NO: 1325 - protein, 25 aa, Homo sapiens
KALKSNSSLTKGLRTMVEQNLMEKL

SEQ ID NO: 1326 - protein, 30 aa, Homo sapiens
KEGGVFTFGAGGYGQLGHNSTSHEINPRKV

SEQ ID NO: 1327 - protein, 22 aa, Homo sapiens
KNRSTASIQPTSDDLVSSAECS

SEQ ID NO: 1328 - protein, 22 aa, Homo sapiens
KAYIHAQAENCSHTAELVSWKR

SEQ ID NO: 1329 - protein, 13 aa, Homo sapiens
RRDMGNFSWGSEC

SEQ ID NO: 1330 - protein, 28 aa, Homo sapiens
MFRMLNSSFEDDPFFSESILAHRENMRQ

SEQ ID NO: 1331 - protein, 20 aa, Homo sapiens
KSIMENASAGVEHLLLGNKC

SEQ ID NO: 1332 - protein, 22 aa, Homo sapiens
KEKPPNENCNNNSPESSLLPRA

SEQ ID NO: 1333 - protein, 21 aa, Homo sapiens
RENMSLPSNLQLNDLTPDSRA

SEQ ID NO: 1334 - protein, 12 aa, Homo sapiens
MPNSSGLMNRRD

SEQ ID NO: 1335 - protein, 17 aa, Homo sapiens
MLASNHMNGSNGESPLA

SEQ ID NO: 1336 - protein, 30 aa, Homo sapiens
RYFNPVDQENALIAAIANWSELASMPVGRS

SEQ ID NO: 1337 - protein, 24 aa, Homo sapiens
KKLRLPDTGLYNMTDSGTGSCKNS

SEQ ID NO: 1338 - protein, 20 aa, Homo sapiens
KNGTVDGTSENTEDGLDRKD

SEQ ID NO: 1339 - protein, 26 aa, Homo sapiens
RLSQNQNNYQISGNLTVPWITGCSRK

SEQ ID NO: 1340 - protein, 34 aa, Homo sapiens
RQGNLSLPLNRELVEKVTNEYNESLLYSPEEPKI

SEQ ID NO: 1341 - protein, 22 aa, Homo sapiens
RVKNGSRVVSTALLSSYHKGIA

SEQ ID NO: 1342 - protein, 19 aa, Homo sapiens
SLKDNSSCSVMSEEPEGRS

SEQ ID NO: 1343 - protein, 25 aa, Homo sapiens
RTPRPASTHNGSVDTENDSCLQQTH

SEQ ID NO: 1344 - protein, 20 aa, Homo sapiens
MSAGNGTPWGSAAGEEVWAG

SEQ ID NO: 1345 - protein, 17 aa, Homo sapiens
RVNLSFDFPFYGHFLRE

SEQ ID NO: 1346 - protein, 31 aa, Homo sapiens
RSFTDLLLDDGQDNNTQIEEDTDHNYYISRI

SEQ ID NO: 1347 - protein, 14 aa, Homo sapiens
KITNISAVEMTPLP

SEQ ID NO: 1348 - protein, 28 aa, Homo sapiens
RFPGVMENLTISAAHWLTAPAPRPRPRR

SEQ ID NO: 1349 - protein, 29 aa, Homo sapiens
MDRWNETVGLEWELERQLALMNSQFNRRV

SEQ ID NO: 1350 - protein, 23 aa, Homo sapiens
RNFDKNGNMMDWWSNFSTQHFRE

SEQ ID NO: 1351 - protein, 19 aa, Homo sapiens
RKSIDEMNNAWENLNKTWK

SEQ ID NO: 1352 - protein, 17 aa, Homo sapiens
RNITPLLLDMVVHNDRL

SEQ ID NO: 1353 - protein, 20 aa, Homo sapiens
KSKSDLAVSNISPPSPDSKS

SEQ ID NO: 1354 - protein, 16 aa, Homo sapiens
GDQLSNLSNLLQQYKT

SEQ ID NO: 1355 - protein, 10 aa, Homo sapiens
DQYGKNFSQS

SEQ ID NO: 1356 - protein, 22 aa, Homo sapiens
RNNSKGYMKLENKEDPMDRLLV

SEQ ID NO: 1357 - protein, 19 aa, Homo sapiens
NNATNESYVDTAAMEAERL

SEQ ID NO: 1358 - protein, 24 aa, Homo sapiens
RTEDVMFISDNESFNPSLWEEQRK

SEQ ID NO: 1359 - protein, 28 aa, Homo sapiens
RGSVIGNINDVEFGIAFLNATITDSPNS

SEQ ID NO: 1360 - protein, 27 aa, Homo sapiens
RYLQINNADLGDTANYTCVASNIAGKT

SEQ ID NO: 1361 - protein, 24 aa, Homo sapiens
RQLGNGSLAIYGTVNEDAGDYTCV

SEQ ID NO: 1362 - protein, 15 aa, Homo sapiens
RVRASSYSANGTIEY

SEQ ID NO: 1363 - protein, 23 aa, Homo sapiens
RKAVPMAPAPASPGSSNDSSARS

SEQ ID NO: 1364 - protein, 17 aa, Homo sapiens
SSSREENWSFLDWDSRF

SEQ ID NO: 1365 - protein, 23 aa, Homo sapiens
KNDTAAVQLHFVSGNNVLAHRSL

SEQ ID NO: 1366 - protein, 29 aa, Homo sapiens
KSVGIFLGIFSGSFTMGAVTGVNANVTKF

SEQ ID NO: 1367 - protein, 12 aa, Homo sapiens
RLKTEYNITLRV

SEQ ID NO: 1368 - protein, 32 aa, Homo sapiens
NNFSTEINTTSILVGPLVSNLEITHTSNLTRV

SEQ ID NO: 1369 - protein, 23 aa, Homo sapiens
RHNFTLAFSTAEKLADCAQLLDV

SEQ ID NO: 1370 - protein, 36 aa, Homo sapiens
  VARIANT (1)...(36): Xaa = Any Amino Acid
KVHTGTHMWNSTPVXQGRQLSGDGPMTFLGGNPIKF

SEQ ID NO: 1371 - protein, 19 aa, Homo sapiens
KGTENHLLAIVNGTKGSRW

SEQ ID NO: 1372 - protein, 21 aa, Homo sapiens
KQPSSPLANTTYNIFIMDGKT

SEQ ID NO: 1373 - protein, 36 aa, Homo sapiens
KMENGQQAADNILSAVPPGLINTSEAGIPAMSTNDL

SEQ ID NO: 1374 - protein, 26 aa, Homo sapiens
RKMFLFGTYLTKNGSEIPSTMQDAKD

SEQ ID NO: 1375 - protein, 24 aa, Homo sapiens
YHGNGTHSESLEHHGYHGNGTDRE

SEQ ID NO: 1376 - protein, 17 aa, Homo sapiens
RGYHGNGTHSESLEHRG

SEQ ID NO: 1377 - protein, 26 aa, Homo sapiens
RVQNTSLEHRGYHGSGTDGESSGRRG

SEQ ID NO: 1378 - protein, 34 aa, Homo sapiens
DDRGSYTASIYQNYMGNSFSGYSHSPPLLQVNRS

SEQ ID NO: 1379 - protein, 24 aa, Homo sapiens
MENRNNMTEFVLLGLTENPKMQKI

SEQ ID NO: 1380 - protein, 31 aa, Homo sapiens
RTNFTLAELGICEPSPHRSGYCSDMGILHQG

SEQ ID NO: 1381 - protein, 22 aa, Homo sapiens
KYKELTLTRNQGICGKNNSYIE

SEQ ID NO: 1382 - protein, 27 aa, Homo sapiens
NQGNFSVVGTVLAATQAEKAVANFDRT

SEQ ID NO: 1383 - protein, 36 aa, Homo sapiens
RTQNLSQPSTGIPSGEPGHSAGGAAGSRCTRSMFRK

SEQ ID NO: 1384 - protein, 30 aa, Homo sapiens
MANRTDNTNRTGDATVIKQEMLTGQEMPRE

SEQ ID NO: 1385 - protein, 24 aa, Homo sapiens
KVTCDIDVNSSLNISAVGKSTEKE

SEQ ID NO: 1386 - protein, 27 aa, Homo sapiens
KHLFEDSQNKLGAEMVINTSGKYGYKS

SEQ ID NO: 1387 - protein, 24 aa, Homo sapiens
RSKGAIAPPEVTVPAQNTSLGPKK

SEQ ID NO: 1388 - protein, 14 aa, Homo sapiens
KKVLAPRVNLTFRK

SEQ ID NO: 1389 - protein, 30 aa, Homo sapiens
KYERGLIFYINHSLYENLDEELNEELAAKV

SEQ ID NO: 1390 - protein, 15 aa, Homo sapiens
KWMLKTGMKNNATKQ

SEQ ID NO: 1391 - protein, 18 aa, Homo sapiens
RIFVGGIDFKTNESDLRK

SEQ ID NO: 1392 - protein, 33 aa, Homo sapiens
KYNLEKDLKDKFVALTIDDICFSLNNNSPNIRY

SEQ ID NO: 1393 - protein, 14 aa, Homo sapiens
MHRLMGVNSTAAAA

SEQ ID NO: 1394 - protein, 25 aa, Homo sapiens
RQMGGNTNTGAALNFTLSLLQKAKK

SEQ ID NO: 1395 - protein, 10 aa, Homo sapiens
MMGHQNHTFS

SEQ ID NO: 1396 - protein, 17 aa, Homo sapiens
KSSNLSEHQTLHTGQRP

SEQ ID NO: 1397 - protein, 15 aa, Homo sapiens
RYGNTTQNVPHNPRR

SEQ ID NO: 1398 - protein, 17 aa, Homo sapiens
RVVNESTVCLMNHERRQ

SEQ ID NO: 1399 - protein, 29 aa, Homo sapiens
RISESGIKKMCRNIFVLQQNLTNITMSRE

SEQ ID NO: 1400 - protein, 29 aa, Homo sapiens
KNNSMNSNMGTGTFGPVGNGVHTGPESRE

SEQ ID NO: 1401 - protein, 32 aa, Homo sapiens
KDHPVSCCLGLLLESLVPFIVNDNITNNFFRF

SEQ ID NO: 1402 - protein, 34 aa, Homo sapiens
RGLNIALVNGTTGAVLGQKAFDMYSGDVMHLVKF

SEQ ID NO: 1403 - protein, 32 aa, Homo sapiens
RGPPSRGGHMDDGGYSMNFNMSSSRGPLPVKR

SEQ ID NO: 1404 - protein, 33 aa, Homo sapiens
RRLWQGLGNFSVNTSKGNTAKNGGLLLSTNMKW

SEQ ID NO: 1405 - protein, 17 aa, Homo sapiens
FSYATAAQNNTVTDPKN

SEQ ID NO: 1406 - protein, 21 aa, Homo sapiens
RVSTNGSDDPEDAGAGENRRV

SEQ ID NO: 1407 - protein, 18 aa, Homo sapiens
KKYLWENETVGAQDDPLA

SEQ ID NO: 1408 - protein, 26 aa, Homo sapiens
KILPISLEPSSSTEPTQSNLSVTAKI

SEQ ID NO: 1409 - protein, 14 aa, Homo sapiens
KNDSDCGVFVLQYC

SEQ ID NO: 1410 - protein, 16 aa, Homo sapiens
KFNVATQNVSTLSSKV

SEQ ID NO: 1411 - protein, 23 aa, Homo sapiens
KWIHTLTSLLQNISSYYTSLPRF

SEQ ID NO: 1412 - protein, 28 aa, Homo sapiens
RNDSIYEASSLYGISAMDGVPFTLHPRF

SEQ ID NO: 1413 - protein, 23 aa, Homo sapiens
MLPNPSHLEAVNPVAVGKTRGRQ

SEQ ID NO: 1414 - protein, 22 aa, Homo sapiens
RESEELECNTGSNITNMHQDKE

SEQ ID NO: 1415 - protein, 31 aa, Homo sapiens
KQNKSPDTEKINYAGPLEETGISDITKKEKE

SEQ ID NO: 1416 - protein, 24 aa, Homo sapiens
KANLTDMESGSSNAMNMNVQHERE

SEQ ID NO: 1417 - protein, 24 aa, Homo sapiens
KVSNLSLFGGLPANHVLVNQYLPG

SEQ ID NO: 1418 - protein, 20 aa, Homo sapiens
MVDLLSMSQNISPYKNPMRF

SEQ ID NO: 1419 - protein, 24 aa, Homo sapiens
RSPPGENPSPQGELPSPESSRRLF

SEQ ID NO: 1420 - protein, 14 aa, Homo sapiens
AGFGNNFTTVDNKS

SEQ ID NO: 1421 - protein, 21 aa, Homo sapiens
KSSVTPAIISAALQQVVHNKS

SEQ ID NO: 1422 - protein, 28 aa, Homo sapiens
KNVTLEEDGTRAVRAAGYAHGLVFSTKE

SEQ ID NO: 1423 - protein, 14 aa, Homo sapiens
RLVPHMNVSAVEKQ

SEQ ID NO: 1424 - protein, 16 aa, Homo sapiens
KAIHLDLEEYRNSSRV

SEQ ID NO: 1425 - protein, 28 aa, Homo sapiens
KAQNGIAIMVYTNSSNTLYWELNQAVRT

SEQ ID NO: 1426 - protein, 33 aa, Homo sapiens
KADNHTAHRIADQTALRVPSQAESSIFSQATNG

SEQ ID NO: 1427 - protein, 24 aa, Homo sapiens
KINLLNLTFCLFVWLTFNLPFLKN

SEQ ID NO: 1428 - protein, 14 aa, Homo sapiens
KYITVNISYVNIFR

SEQ ID NO: 1429 - protein, 21 aa, Homo sapiens
KCPECDQNFSDHSYLVLHQKI

SEQ ID NO: 1430 - protein, 22 aa, Homo sapiens
KLEVEDLDENFLNSSYQTVFKT

SEQ ID NO: 1431 - protein, 27 aa, Homo sapiens
RVLTNMTHEDDVPINCTMVLLHIVSKC

SEQ ID NO: 1432 - protein, 24 aa, Homo sapiens
KVSSPLENEKLKSMTINFSSLNRK

SEQ ID NO: 1433 - protein, 24 aa, Homo sapiens
RSYSVSGVCQPAIPNSSLHIPHNA

SEQ ID NO: 1434 - protein, 28 aa, Homo sapiens
MLTGVLLANGTLNASILNSLYNENLVKE

SEQ ID NO: 1435 - protein, 25 aa, Homo sapiens
FFLTTPAIIMNTIDMYNVTRPIEKL

SEQ ID NO: 1436 - protein, 18 aa, Homo sapiens
KGKRMLSEYLSPNLSLRA

SEQ ID NO: 1437 - protein, 20 aa, Homo sapiens
DSDMDPNSSGEGVNSVSSSI

SEQ ID NO: 1438 - protein, 30 aa, Homo sapiens
DKAKKEHERSNASPAIFPEYQLWEDHWIRC

SEQ ID NO: 1439 - protein, 21 aa, Homo sapiens
FAPFLNNSPQQNPAAQIPARQ

SEQ ID NO: 1440 - protein, 19 aa, Homo sapiens
QIVIKMFQNISNIIKSGKM

SEQ ID NO: 1441 - protein, 24 aa, Homo sapiens
KNASMNTQHGTATEVAVETTTPKQ

SEQ ID NO: 1442 - protein, 18 aa, Homo sapiens
REYNLNFSGSSTIQEVKR

SEQ ID NO: 1443 - protein, 20 aa, Homo sapiens
RVGECSCQVSLMLQNSSARA

SEQ ID NO: 1444 - protein, 15 aa, Homo sapiens
VVRSGASLLSNMSRH

SEQ ID NO: 1445 - protein, 24 aa, Homo sapiens
KLIKTDESVVDRAKANASLWEARL

SEQ ID NO: 1446 - protein, 18 aa, Homo sapiens
VSWEILSNLSFLVTIQRA

SEQ ID NO: 1447 - protein, 21 aa, Homo sapiens
NDNFGIGGNFSGLGGFGGSRG

SEQ ID NO: 1448 - protein, 23 aa, Homo sapiens
RRLSIGLDNGTISEFILSEDYNK

SEQ ID NO: 1449 - protein, 14 aa, Homo sapiens
MNGGNESSGADRAG

SEQ ID NO: 1450 - protein, 15 aa, Homo sapiens
MNGTSSQPKKEEYGS

SEQ ID NO: 1451 - protein, 31 aa, Homo sapiens
NKMGQLGLGNQTDAVPSPAQIMYNGQPITKM

SEQ ID NO: 1452 - protein, 27 aa, Homo sapiens
KLKLEAELGNMQGLVSGMQNMSIHTKT

SEQ ID NO: 1453 - protein, 15 aa, Homo sapiens
GKVFNDSGNLSNHKR

SEQ ID NO: 1454 - protein, 28 aa, Homo sapiens
KVTRDALTEPLAIVEGYNSYFSFSRNRS

SEQ ID NO: 1455 - protein, 26 aa, Homo sapiens
KSNEVVAVPTNGTVNNVAQEPVNTLG

SEQ ID NO: 1456 - protein, 30 aa, Homo sapiens
RAQIFANTVDNSSIALQTDNTHLAADDLRV

SEQ ID NO: 1457 - protein, 20 aa, Homo sapiens
KKSFACSSCNYTFAKKEQFD

SEQ ID NO: 1458 - protein, 21 aa, Homo sapiens
MESLALSNATGLSADGGAKRQ

SEQ ID NO: 1459 - protein, 36 aa, Homo sapiens
KNGQSLGDLDGIPIAVKDNFSTSGIETTCASNMLKG

SEQ ID NO: 1460 - protein, 24 aa, Homo sapiens
RVKAISDSDGVSYPWYGNTTETVT

SEQ ID NO: 1461 - protein, 24 aa, Homo sapiens
RFANGSAVIQSGDTAVMATAVSKT

SEQ ID NO: 1462 - protein, 38 aa, Homo sapiens
  VARIANT (1)...(38): Xaa = Any Amino Acid
NGNSVALSLSDILWNGPVGTVXIGMTDGECVVNPTRKE

SEQ ID NO: 1463 - protein, 28 aa, Homo sapiens
KFRNPPLVNGSLALAFQGTAPPPNWRRP

SEQ ID NO: 1464 - protein, 36 aa, Homo sapiens
VYNGSVDEGSKPGTYVMTVTANDADDSTTANGMVRY

SEQ ID NO: 1465 - protein, 24 aa, Homo sapiens
RRVYDFVGLLVSPEMEQFALNMTS

SEQ ID NO: 1466 - protein, 29 aa, Homo sapiens
RFIIVSAFDHFASVHSVSAEGTVVSNLSS

SEQ ID NO: 1467 - protein, 33 aa, Homo sapiens
KYRETKSQESEELVVTGGGGLRRFKTIELNSTI

SEQ ID NO: 1468 - protein, 23 aa, Homo sapiens
KMSGGSTMSSGGGNTNNSNSKKK

SEQ ID NO: 1469 - protein, 30 aa, Homo sapiens
VTQQMSNISGSCSMLQQTSISSPPTCSVKS

SEQ ID NO: 1470 - protein, 26 aa, Homo sapiens
RRRINSSVTTETISETTEVLNEPFDN

SEQ ID NO: 1471 - protein, 23 aa, Homo sapiens
KRRKPGSHTHSASEDNTTNNVRE

SEQ ID NO: 1472 - protein, 28 aa, Homo sapiens
RLGKPSVMTPTEGLDTGEMSNSTSSLKR

SEQ ID NO: 1473 - protein, 15 aa, Homo sapiens
EYDTIPHTNRTILKE

SEQ ID NO: 1474 - protein, 16 aa, Homo sapiens
LGLNLSEGDGEEVYHF

SEQ ID NO: 1475 - protein, 19 aa, Homo sapiens
KYSTTTAQNSSSSSSQSKM

SEQ ID NO: 1476 - protein, 24 aa, Homo sapiens
RGVNGSPRISVTVGNIPKNSVSSS

SEQ ID NO: 1477 - protein, 31 aa, Homo sapiens
RMQNNSSPSISPNTSFTSDGSPSPLGGIKRK

SEQ ID NO: 1478 - protein, 26 aa, Homo sapiens
KEVTQATQPEAIPQGTNITEEKPGRK

SEQ ID NO: 1479 - protein, 27 aa, Homo sapiens
KTHMNVLGVLGPLDPQWLVENNITGCP

SEQ ID NO: 1480 - protein, 22 aa, Homo sapiens
KKSSLDSNSSEMAIMMGADAKI

SEQ ID NO: 1481 - protein, 28 aa, Homo sapiens
RSSSGHLFTLPGATPGGDPNSNNSNNKL

SEQ ID NO: 1482 - protein, 28 aa, Homo sapiens
CQAEAAAAANGTGGEEDDGPAAELLEKL

SEQ ID NO: 1483 - protein, 23 aa, Homo sapiens
RWEALGNTLSSQPNLTVSWDPRI

SEQ ID NO: 1484 - protein, 32 aa, Homo sapiens
RGMGPMGTPIMPSPADSTNSSDNIYTMTGGRS

SEQ ID NO: 1485 - protein, 34 aa, Homo sapiens
KTHTNISESHPNATFSAVGEASICEDDWNSGERF

SEQ ID NO: 1486 - protein, 23 aa, Homo sapiens
RGLTFQQNASSMCVPDQDTAIRV

SEQ ID NO: 1487 - protein, 11 aa, Homo sapiens
KNNSDISSTRG

SEQ ID NO: 1488 - protein, 27 aa, Homo sapiens
RNPVTSTNVLGMMTAILGVFLYNKTKY

SEQ ID NO: 1489 - protein, 34 aa, Homo sapiens
KDDWIRPALLSGPVAANVLNFSDHHVIPMPLLKG

SEQ ID NO: 1490 - protein, 26 aa, Homo sapiens
KLEFLPEEIGQMQKLRVLNLSDNRLK

SEQ ID NO: 1491 - protein, 19 aa, Homo sapiens
KMNCNNRNVSSLADLKPKL

SEQ ID NO: 1492 - protein, 28 aa, Homo sapiens
RLEEFEGGGGGEGNVSQVGRVWPSSYRA

SEQ ID NO: 1493 - protein, 25 aa, Homo sapiens
RLVSNDSFISIQPSLSSCGQDLPRD

SEQ ID NO: 1494 - protein, 28 aa, Homo sapiens
RSKKLGGSGGSNGSSSGKTDSGGGSRRS

SEQ ID NO: 1495 - protein, 19 aa, Homo sapiens
TDGTTITESSNLSEIESRL

SEQ ID NO: 1496 - protein, 26 aa, Homo sapiens
MMNYGQSMSGGNGQAANQTLSPQMWK

SEQ ID NO: 1497 - protein, 19 aa, Homo sapiens
FSYPNGLSENTSVVEKLKH

SEQ ID NO: 1498 - protein, 36 aa, Homo sapiens
KHAAFFADAEGYFAACTTDTTMNSSLSEPLYVPVKF

SEQ ID NO: 1499 - protein, 12 aa, Homo sapiens
KNGTAVCATNRR

SEQ ID NO: 1500 - protein, 19 aa, Homo sapiens
KLSDLSINSTECLHVHCRG

SEQ ID NO: 1501 - protein, 14 aa, Homo sapiens
KFLNNGTCTAEGKF

SEQ ID NO: 1502 - protein, 38 aa, Homo sapiens
RASVVWMAYMNISFHVGNHVLSELGETGVFGRSSTLKR

SEQ ID NO: 1503 - protein, 25 aa, Homo sapiens
EDGLYGAPEPNGSWTGMVGELINRK

SEQ ID NO: 1504 - protein, 22 aa, Homo sapiens
DDSGATLLSANQTLRRLHNRRT

SEQ ID NO: 1505 - protein, 35 aa, Homo sapiens
KMEQKAKQNQVASPQPPHPGEITNAHNSSCISNKF

SEQ ID NO: 1506 - protein, 25 aa, Homo sapiens
KDRCNVEKVPSNSQLEIEGNSSGRQ

SEQ ID NO: 1507 - protein, 18 aa, Homo sapiens
KKLAEILVNTSSENWIRN

SEQ ID NO: 1508 - protein, 21 aa, Homo sapiens
KVPTGTITEVSSTGVNSSSKI

SEQ ID NO: 1509 - protein, 33 aa, Homo sapiens
TQHFYLNFTITNLPYSQDKAQPGTTNYQRNKRN

SEQ ID NO: 1510 - protein, 17 aa, Homo sapiens
  VARIANT (1)...(17): Xaa = Any Amino Acid
KFNTTEXVLQGLLXPXF

SEQ ID NO: 1511 - protein, 24 aa, Homo sapiens
RKTNELPSDSSSSSDLINTSIASS

SEQ ID NO: 1512 - protein, 16 aa, Homo sapiens
KNTSVGPLYSGSRLTL

SEQ ID NO: 1513 - protein, 33 aa, Homo sapiens
MAAGPLLVPFTLNFTITNLQYGEDMGHPGSRKF

SEQ ID NO: 1514 - protein, 19 aa, Homo sapiens
REPGTSSTSNLSSTSHERL

SEQ ID NO: 1515 - protein, 28 aa, Homo sapiens
MERAPPDGPLNASGALAGDAAAAGGARG

SEQ ID NO: 1516 - protein, 20 aa, Homo sapiens
VQVCSLPACGGNHQNSTVRA

SEQ ID NO: 1517 - protein, 26 aa, Homo sapiens
RMIVEIHLEEYNNISKKPMNLVLFRF

SEQ ID NO: 1518 - protein, 27 aa, Homo sapiens
KGEISEKAKLENSTQAEEGFDVPDCKK

SEQ ID NO: 1519 - protein, 34 aa, Homo sapiens
KRRTTNRTIPSVDDFQNYLRVAFQEVNSGCTGKT

SEQ ID NO: 1520 - protein, 19 aa, Homo sapiens
KMPYIQNLSSLPTRTELRT

SEQ ID NO: 1521 - protein, 30 aa, Homo sapiens
PMQNFMAGTAGVYQTQGLVGSSNGSSHKKS

SEQ ID NO: 1522 - protein, 22 aa, Homo sapiens
RIQLENVTLLNPDPAEGPKPRP

SEQ ID NO: 1523 - protein, 29 aa, Homo sapiens
RTLQQLYEAYASKSNNTAYLIYNDGVPKP

SEQ ID NO: 1524 - protein, 25 aa, Homo sapiens
RWGHSECGHKEDAAVNCTDISVQKT

SEQ ID NO: 1525 - protein, 15 aa, Homo sapiens
WLNAQFDGNNETIKW

SEQ ID NO: 1526 - protein, 26 aa, Homo sapiens
RCTLHPNDSLAMEGPLSRVKSLKKSL

SEQ ID NO: 1527 - protein, 30 aa, Homo sapiens
RVGVDPDQDPPPNNDSFQVLQGDSPDSARG

SEQ ID NO: 1528 - protein, 24 aa, Homo sapiens
VKVVMDIPYELWNETSAEVADLKK

SEQ ID NO: 1529 - protein, 28 aa, Homo sapiens
KLNPTPGSNAISDAYLNASETTTLSPSG

SEQ ID NO: 1530 - protein, 19 aa, Homo sapiens
KWKNIETFTCDTQNITYRF

SEQ ID NO: 1531 - protein, 16 aa, Homo sapiens
KHSSGSSNTSTANRRA

SEQ ID NO: 1532 - protein, 33 aa, Homo sapiens
RKFKTNVLPFRQNDSSSHCQKSGSPISSEERRR

SEQ ID NO: 1533 - protein, 17 aa, Homo sapiens
KVDSNDSLYGGDSKFLA

SEQ ID NO: 1534 - protein, 30 aa, Homo sapiens
RASSPNSTVSNTSTEGFGGIMSFASSLYRN

SEQ ID NO: 1535 - protein, 13 aa, Homo sapiens
MDTRNLSLAHNRI

SEQ ID NO: 1536 - protein, 18 aa, Homo sapiens
ISNPLHCNMTMTPGTCRV

SEQ ID NO: 1537 - protein, 29 aa, Homo sapiens
MNNSCLTNAVHLNNVSVVSPVNVHINTRT

SEQ ID NO: 1538 - protein, 32 aa, Homo sapiens
MLFLSMNLTISAGPASTLPTATPAAGELTMRS

SEQ ID NO: 1539 - protein, 21 aa, Homo sapiens
RRSLNSSSSSPPSSPTMMPRL

SEQ ID NO: 1540 - protein, 19 aa, Homo sapiens
MKNSCNVLHPQSPNNSNRQ

SEQ ID NO: 1541 - protein, 24 aa, Homo sapiens
SISHDNNNISSTSELGTDLANTKV

SEQ ID NO: 1542 - protein, 24 aa, Homo sapiens
RILVNLSMVENKLVELEHTLLSKG

SEQ ID NO: 1543 - protein, 28 aa, Homo sapiens
RVRRTDDTPVVLVGNKSDLKQLRQVTKE

SEQ ID NO: 1544 - protein, 23 aa, Homo sapiens
GIKVKNHSGGGMSLTHNKNFRKL

SEQ ID NO: 1545 - protein, 32 aa, Homo sapiens
  VARIANT (1)...(32): Xaa = Any Amino Acid
MLGSEMXGQNVSNPAPSPSLSGVSWPDNVPKI

SEQ ID NO: 1546 - protein, 12 aa, Homo sapiens
RVWQNLSEPIRP

SEQ ID NO: 1547 - protein, 13 aa, Homo sapiens
RKNASALYEKIRG

SEQ ID NO: 1548 - protein, 29 aa, Homo sapiens
KHTGSGILSMANAGPNTNGSQFFICTAKT

SEQ ID NO: 1549 - protein, 23 aa, Homo sapiens
KGACNGSVDCEDTTNHNILQARD

SEQ ID NO: 1550 - protein, 28 aa, Homo sapiens
KQVGEKAMNASANITSDGVEVLGKMVRS

SEQ ID NO: 1551 - protein, 28 aa, Homo sapiens
MSSHFYINDVNFTRKMLLMFFEVSAHES

SEQ ID NO: 1552 - protein, 25 aa, Homo sapiens
MNGSGQSPSVLKGILHEAAMQYPKQ

SEQ ID NO: 1553 - protein, 27 aa, Homo sapiens
MKENPAKEQLWALEQDNCSLANLVCKV

SEQ ID NO: 1554 - protein, 26 aa, Homo sapiens
MVVLCASTLPDWRNAAADNRSLDDRS

SEQ ID NO: 1555 - protein, 24 aa, Homo sapiens
RFVRLGTASMLTSPDGPFINLSRL

SEQ ID NO: 1556 - protein, 21 aa, Homo sapiens
KKDGENVSMKDPPDLLDRQKC

SEQ ID NO: 1557 - protein, 16 aa, Homo sapiens
KNETVSSNSSNNTGNS

SEQ ID NO: 1558 - protein, 34 aa, Homo sapiens
KVLQAMGYPTGFDADIECMSSDEKSDNESKNETV

SEQ ID NO: 1559 - protein, 10 aa, Homo sapiens
RQRNASRDQV

SEQ ID NO: 1560 - protein, 19 aa, Homo sapiens
KVRRPSPNRSKLSNVARKA

SEQ ID NO: 1561 - protein, 18 aa, Homo sapiens
MTWSFGWNSSLPVYYIRE

SEQ ID NO: 1562 - protein, 14 aa, Homo sapiens
KVKFGMNVTSSEKV

SEQ ID NO: 1563 - protein, 19 aa, Homo sapiens
KLKTNVTFPLDILLLSFKA

SEQ ID NO: 1564 - protein, 31 aa, Homo sapiens
KTLSTKTPSAAQNPMMTNASATQATLTAQKF

SEQ ID NO: 1565 - protein, 15 aa, Homo sapiens
RCDKAFNQSANLTKH

SEQ ID NO: 1566 - protein, 30 aa, Homo sapiens
KEKDSNSSSGSFNGEQEPIIGFQPMDSTRA

SEQ ID NO: 1567 - protein, 22 aa, Homo sapiens
LYNDSTYNQQLIIPSIGLPLKT

SEQ ID NO: 1568 - protein, 21 aa, Homo sapiens
KNTSNKEISRDTLLTIENNPC

SEQ ID NO: 1569 - protein, 26 aa, Homo sapiens
RSRATIFEINASSRDLCSQVMRAKRQ

SEQ ID NO: 1570 - protein, 19 aa, Homo sapiens
RGNIYPGNDTFDIDPEIET

SEQ ID NO: 1571 - protein, 36 aa, Homo sapiens
MNRRNILVMKHNYSQDAADACDIDEIEEVPTTSHRL

SEQ ID NO: 1572 - protein, 23 aa, Homo sapiens
AIYFENLQNSSNDLGDHSMKERD

SEQ ID NO: 1573 - protein, 29 aa, Homo sapiens
KFDILMTSNEINATGHQQTLLVPSEDGAT

SEQ ID NO: 1574 - protein, 19 aa, Homo sapiens
MEAVQKINYTVPQSGTFKI

SEQ ID NO: 1575 - protein, 25 aa, Homo sapiens
RMDDVPSHSKALSDGNGSSGIEWSN

SEQ ID NO: 1576 - protein, 25 aa, Homo sapiens
LIHALATNSSSELFRLAAHPLNNRM

SEQ ID NO: 1577 - protein, 20 aa, Homo sapiens
QRNISLQLMSNMNISNKIRN

SEQ ID NO: 1578 - protein, 21 aa, Homo sapiens
KMFFETNENNDTTYQNLWDAF

SEQ ID NO: 1579 - protein, 29 aa, Homo sapiens
KNLTQSHSTTWKLNNLLLNDYWVHNEMKA

SEQ ID NO: 1580 - protein, 36 aa, Homo sapiens
LKLGVVPVYYGSPSITDWLPSNKSAILVSEFSHPRE

SEQ ID NO: 1581 - protein, 20 aa, Homo sapiens
AHNMSGPNSSSEWSIEGRRL

SEQ ID NO: 1582 - protein, 32 aa, Homo sapiens
KALATSMLTGEAGSLPSTHMVVAGMANSTPQQ

SEQ ID NO: 1583 - protein, 29 aa, Homo sapiens
RVQPAQNHSSLSNVSQAVASTTPLPPPKP

SEQ ID NO: 1584 - protein, 23 aa, Homo sapiens
KNLTAVKSGGTSDSFVKGYLLPD

SEQ ID NO: 1585 - protein, 31 aa, Homo sapiens
MDFGDSSGVEMRLHNMSEAMAVTAYHQYSKG

SEQ ID NO: 1586 - protein, 16 aa, Homo sapiens
KLPHNGSTGSTPLLRN

SEQ ID NO: 1587 - protein, 34 aa, Homo sapiens
PFPGNMSSMTPSSPGMSQQGGPGMGPPMPTVNRK

SEQ ID NO: 1588 - protein, 33 aa, Homo sapiens
LVISGLSAAEGGNTSDTQSSSSVNIVMGPSARA

SEQ ID NO: 1589 - protein, 29 aa, Homo sapiens
KDNKYTLNQTSAVFDSIPEVVHYYSNEKL

SEQ ID NO: 1590 - protein, 20 aa, Homo sapiens
KLSDSNQTLKVIGEFILERN

SEQ ID NO: 1591 - protein, 13 aa, Homo sapiens
KNPTTEETVLTKT

SEQ ID NO: 1592 - protein, 30 aa, Homo sapiens
RLMAFGCVSGSVQVYTIDNSTGAMLLSHKL

SEQ ID NO: 1593 - protein, 16 aa, Homo sapiens
KMIGLEDFVADNYSKI

SEQ ID NO: 1594 - protein, 26 aa, Homo sapiens
KELFGDDSEDEGASHHSGSDNHSERS

SEQ ID NO: 1595 - protein, 27 aa, Homo sapiens
KSGNYTVLQVVEALGSSLENPEPRTRA

SEQ ID NO: 1596 - protein, 25 aa, Homo sapiens
MRGIETVLLIKNNSVARAVMQSQKP

SEQ ID NO: 1597 - protein, 27 aa, Homo sapiens
RIAQKGGAEAMLVVNNSVLFPPSGNRS

SEQ ID NO: 1598 - protein, 20 aa, Homo sapiens
KEANINSTSISDDNSASLRC

SEQ ID NO: 1599 - protein, 25 aa, Homo sapiens
KAKAGFSEWLAVDGLGSPSNNSKED

SEQ ID NO: 1600 - protein, 29 aa, Homo sapiens
MVDAASYAANLTDSAEAPKGSPGSWWKKE

SEQ ID NO: 1601 - protein, 23 aa, Homo sapiens
RLVVGDFSDYNNSYVGAFADARS

SEQ ID NO: 1602 - protein, 26 aa, Homo sapiens
RYQQLAVALDSSYVTNKQLNITIEKL

SEQ ID NO: 1603 - protein, 26 aa, Homo sapiens
KNYEDEPNNYRTMHGRAVNGSQLGKD

SEQ ID NO: 1604 - protein, 10 aa, Homo sapiens
RKNITNDIRT

SEQ ID NO: 1605 - protein, 20 aa, Homo sapiens
RYIRTLMSSGQMAPSSSNKS

SEQ ID NO: 1606 - protein, 24 aa, Homo sapiens
RQNSSSAQGSSSNSGGGSGIPQPP

SEQ ID NO: 1607 - protein, 18 aa, Homo sapiens
TPKGNSSNGNSGSNSNKA

SEQ ID NO: 1608 - protein, 27 aa, Homo sapiens
KLYDQCHDTLVQFGGFLASNLSTEDYI

SEQ ID NO: 1609 - protein, 22 aa, Homo sapiens
SPARQNVSSASNPENDSSHVRI

SEQ ID NO: 1610 - protein, 24 aa, Homo sapiens
KGNKNGDNNSNHNGEGNGQSGHSA

SEQ ID NO: 1611 - protein, 34 aa, Homo sapiens
RFQFCGRNASAVPVFYSSMSTAMVIFKSGVVNRN

SEQ ID NO: 1612 - protein, 14 aa, Homo sapiens
KLCSSVNVSNEIKS

SEQ ID NO: 1613 - protein, 19 aa, Homo sapiens
KISNVALDSMHWQNDSVQI

SEQ ID NO: 1614 - protein, 16 aa, Homo sapiens
VERPSSLLSLNTSNKG

SEQ ID NO: 1615 - protein, 16 aa, Homo sapiens
RNITIMASGNTGGEKD

SEQ ID NO: 1616 - protein, 23 aa, Homo sapiens
RTNSRLSHMPPLPLNPSSNPTSL

SEQ ID NO: 1617 - protein, 21 aa, Homo sapiens
NLTQNLMQNLTQSLSQKENRE

SEQ ID NO: 1618 - protein, 26 aa, Homo sapiens
TNASPEKTTYDSAEEENKENLYAGKN

SEQ ID NO: 1619 - protein, 12 aa, Homo sapiens
KAIINSTVTPNM

SEQ ID NO: 1620 - protein, 22 aa, Homo sapiens
KVDPETNKNITRGQSLDNLIKV

SEQ ID NO: 1621 - protein, 15 aa, Homo sapiens
KAFSQNISLVQHLRT

SEQ ID NO: 1622 - protein, 25 aa, Homo sapiens
KSSEFASIPANSSRPLSNISKSGRM

SEQ ID NO: 1623 - protein, 15 aa, Homo sapiens
REQQNDTSSELQNRE

SEQ ID NO: 1624 - protein, 37 aa, Homo sapiens
RDNGPDGMEPECVIESNWNEIVDSFDDMNLSESLLRD

SEQ ID NO: 1625 - protein, 32 aa, Homo sapiens
RLYHFLLGAWSLNATELDPCPLSPELLGLTKE

SEQ ID NO: 1626 - protein, 23 aa, Homo sapiens
RGFGVAIVGNYTAALPTEAALRT

SEQ ID NO: 1627 - protein, 27 aa, Homo sapiens
RLEPVHLQLQCMSQEQLAQVAANATKE

SEQ ID NO: 1628 - protein, 16 aa, Homo sapiens
TPVPGYMNNTVNTMRL

SEQ ID NO: 1629 - protein, 30 aa, Homo sapiens
REVNTSGFAPARPPPQPGSTTFWAWSVLRV

SEQ ID NO: 1630 - protein, 9 aa, Homo sapiens
RTLLNASRS

SEQ ID NO: 1631 - protein, 24 aa, Homo sapiens
KVLEANATPLDRGDGVLRTCALRP

SEQ ID NO: 1632 - protein, 26 aa, Homo sapiens
RTRSTSSAGSNNSAEGAGLTDNGCRR

SEQ ID NO: 1633 - protein, 23 aa, Homo sapiens
KGILYGTMTLELGGTVNITCQKT

SEQ ID NO: 1634 - protein, 40 aa, Homo sapiens
RKQAGPLLSGDPHLLPPAASPKGASVSINVNTSLEDMRSN

SEQ ID NO: 1635 - protein, 31 aa, Homo sapiens
KRPLEDGDQPDAKKVAPQNDSFGTQLPPMHQ

SEQ ID NO: 1636 - protein, 23 aa, Homo sapiens
KQKNSSDQEGNNISSSSGHRVRL

SEQ ID NO: 1637 - protein, 33 aa, Homo sapiens
KNTNQNSSAHPPHLNMDDTVNQSNIELKNVNRN

SEQ ID NO: 1638 - protein, 17 aa, Homo sapiens
IQIRNVSQLPATWRMKE

SEQ ID NO: 1639 - protein, 18 aa, Homo sapiens
FTQNLLLEYTNQTTQARP

SEQ ID NO: 1640 - protein, 22 aa, Homo sapiens
RDGEQSPNVSLMQRMSDMLSRW

SEQ ID NO: 1641 - protein, 30 aa, Homo sapiens
RKQSESSFISGDINSTSTLNQGLTSHGLRA

SEQ ID NO: 1642 - protein, 27 aa, Homo sapiens
KSFLNAFSEEINNSMIILSLSPTTFKN

SEQ ID NO: 1643 - protein, 12 aa, Homo sapiens
MDGNDSDYDPKK

SEQ ID NO: 1644 - protein, 23 aa, Homo sapiens
KTVLTPATNHMGNVTFTIPANRE

SEQ ID NO: 1645 - protein, 26 aa, Homo sapiens
KHYLMWGLSSDFWGEKPNLSYIIGKD

SEQ ID NO: 1646 - protein, 12 aa, Homo sapiens
KVVPEGIRMNKT

SEQ ID NO: 1647 - protein, 20 aa, Homo sapiens
KGEPGAPGENGTPGQTGARG

SEQ ID NO: 1648 - protein, 24 aa, Homo sapiens
KRYEDGTISSNATHVEHPLCPPKP

SEQ ID NO: 1649 - protein, 29 aa, Homo sapiens
RHIANSIRTHGTGIMNTTKWAFTAWRGGP

SEQ ID NO: 1650 - protein, 28 aa, Homo sapiens
NKTTSLGQMENNNLDELNKSKIIVKKKP

SEQ ID NO: 1651 - protein, 12 aa, Homo sapiens
MIQNTFNFSLKQ

SEQ ID NO: 1652 - protein, 33 aa, Homo sapiens
KSKEQNVSDDPESTGFLYPYNDLLVWAVLMKRQ

SEQ ID NO: 1653 - protein, 16 aa, Homo sapiens
RRYTNSSADNEECRVP

SEQ ID NO: 1654 - protein, 35 aa, Homo sapiens
RVGGFGFVATPSPAPGVNESPMMTWGEVENTPLRV

SEQ ID NO: 1655 - protein, 25 aa, Homo sapiens
KLAKIRDNLAISLDNQSSPSPPVLI

SEQ ID NO: 1656 - protein, 26 aa, Homo sapiens
RFMGPASGMNMSGMGGLGSLGDVSKN

SEQ ID NO: 1657 - protein, 31 aa, Homo sapiens
LGNTKDFIISFDLKFLTNGSVSVVLETTEKN

SEQ ID NO: 1658 - protein, 28 aa, Homo sapiens
KTSIAQSVLQSLPSSQWSVLVVNMSAQT

SEQ ID NO: 1659 - protein, 21 aa, Homo sapiens
KCSVALLNETESVLSYLDKED

SEQ ID NO: 1660 - protein, 18 aa, Homo sapiens
RGPECSQNYTTPSGVIKS

SEQ ID NO: 1661 - protein, 33 aa, Homo sapiens
RNPSQLPALSSSPAHSGMMGINSYGSQLGVSIS

SEQ ID NO: 1662 - protein, 28 aa, Homo sapiens
REPAQGLFGTVTVQFIVTEVNSSNESKD

SEQ ID NO: 1663 - protein, 20 aa, Homo sapiens
MTSWISPAVNNSDFWTYRKN

SEQ ID NO: 1664 - protein, 18 aa, Homo sapiens
FQLMNITAGTSHVMISRR

SEQ ID NO: 1665 - protein, 26 aa, Homo sapiens
NDQLSEIEEFFYINLTSVEIRGLQKF

SEQ ID NO: 1666 - protein, 15 aa, Homo sapiens
VKPYVNGTSPVYSRE

SEQ ID NO: 1667 - protein, 10 aa, Homo sapiens
RHDQENDTRW

SEQ ID NO: 1668 - protein, 20 aa, Homo sapiens
KDVPPSINTTNIDTLLVATD

SEQ ID NO: 1669 - protein, 22 aa, Homo sapiens
MLLNGTPFAFVIDLAALASRRE

SEQ ID NO: 1670 - protein, 14 aa, Homo sapiens
RNLTAGMAMSTCRE

SEQ ID NO: 1671 - protein, 16 aa, Homo sapiens
KTRPQNGSMILYNRKK

SEQ ID NO: 1672 - protein, 24 aa, Homo sapiens
KHPENNQKSENNQKLLTGANSSRF

SEQ ID NO: 1673 - protein, 20 aa, Homo sapiens
LRTTNGRLNIDNLNLSFRKE

SEQ ID NO: 1674 - protein, 22 aa, Homo sapiens
LNRIPGVPGSMPNASWTGNLRA

SEQ ID NO: 1675 - protein, 20 aa, Homo sapiens
KLVGLNLSPPMSPVQLPLRA

SEQ ID NO: 1676 - protein, 32 aa, Homo sapiens
RLLNLSFCGGISDAGLLHLSHMGSLRSLNLRS

SEQ ID NO: 1677 - protein, 21 aa, Homo sapiens
RQKENDTQIFNDSAVDNHSKC

SEQ ID NO: 1678 - protein, 20 aa, Homo sapiens
KSIENDSDEVEERAENFPRT

SEQ ID NO: 1679 - protein, 34 aa, Homo sapiens
MPTFCIPENHCGTHAPVWLNGSHPLEGDGIVQRQ

SEQ ID NO: 1680 - protein, 26 aa, Homo sapiens
RRGAIKHQVNFSSGGVAPLGGSWHRL

SEQ ID NO: 1681 - protein, 25 aa, Homo sapiens
SPQRSSMNNGSPTALSGSKTNSPKN

SEQ ID NO: 1682 - protein, 19 aa, Homo sapiens
KWLPNSTTTCSLSPDSAIL

SEQ ID NO: 1683 - protein, 14 aa, Homo sapiens
RFQLLNFSSSELKV

SEQ ID NO: 1684 - protein, 25 aa, Homo sapiens
SVNGSGALGSTGGGGPVGSMENGKP

SEQ ID NO: 1685 - protein, 17 aa, Homo sapiens
RFLNNDSSGAEANSEKY

SEQ ID NO: 1686 - protein, 23 aa, Homo sapiens
KTDEKLNVSDENTASCPLSPIKM

SEQ ID NO: 1687 - protein, 23 aa, Homo sapiens
RGMYLVFDGSVDLHYNCSAKCKS

SEQ ID NO: 1688 - protein, 21 aa, Homo sapiens
KAYAGRKQHYIAGNCSSNGRG

SEQ ID NO: 1689 - protein, 11 aa, Homo sapiens
RFGCEIENNRS

SEQ ID NO: 1690 - protein, 20 aa, Homo sapiens
KDIVEYYNDSNGSHVLQGRF

SEQ ID NO: 1691 - protein, 16 aa, Homo sapiens
RGDVLHNGNGTYQSWV

SEQ ID NO: 1692 - protein, 19 aa, Homo sapiens
STSGLLNSTWPLPSATQRC

SEQ ID NO: 1693 - protein, 19 aa, Homo sapiens
KVIQMDVALFEMNQSDSKE

SEQ ID NO: 1694 - protein, 22 aa, Homo sapiens
KFEALKEENMDLNNMNQSLTLE

SEQ ID NO: 1695 - protein, 29 aa, Homo sapiens
RLEDLEVTGSSFLNLSTNIFSNLTSLGKL

SEQ ID NO: 1696 - protein, 23 aa, Homo sapiens
KLYLGSNNLTALHPALFQNLSKL

SEQ ID NO: 1697 - protein, 32 aa, Homo sapiens
KLGSLQELFLDSNNISELPPQVFSQLFCLERL

SEQ ID NO: 1698 - protein, 12 aa, Homo sapiens
RAFGSNPNLTKV

SEQ ID NO: 1699 - protein, 28 aa, Homo sapiens
RWLNVQLSPWQGSLGLQYNASQEWDLRS

SEQ ID NO: 1700 - protein, 30 aa, Homo sapiens
RNAITHLPLSIFASLGNLTFLSLQWNMLRV

SEQ ID NO: 1701 - protein, 26 aa, Homo sapiens
MSGREETEKVNTSPSVNTKTTTESKA

SEQ ID NO: 1702 - protein, 15 aa, Homo sapiens
KWNFSSGFIEAVFKH

SEQ ID NO: 1703 - protein, 28 aa, Homo sapiens
MKNATSSKQLPLEPESPSGQVGPRPAPP

SEQ ID NO: 1704 - protein, 13 aa, Homo sapiens
MRKLGHLNNFTKL

SEQ ID NO: 1705 - protein, 20 aa, Homo sapiens
KRSVLPPDGNGSPVLPDKRN

SEQ ID NO: 1706 - protein, 36 aa, Homo sapiens
RSAPSGGGASFNLSLTEEHSGNYSCEANNGLGAQRS

SEQ ID NO: 1707 - protein, 29 aa, Homo sapiens
RNLDPENGSGMALQPLQAAPEPGAQGQRE

SEQ ID NO: 1708 - protein, 13 aa, Homo sapiens
RKLFQEILNTSRE

SEQ ID NO: 1709 - protein, 24 aa, Homo sapiens
KHLSDYCIGPNASINVIMQPLEKM

SEQ ID NO: 1710 - protein, 36 aa, Homo sapiens
KEIKGIQIGREEVNLSLLADDMILYLENPVVSAQRP

SEQ ID NO: 1711 - protein, 25 aa, Homo sapiens
DPLTFNFISSLKAICTEIANCSLKV

SEQ ID NO: 1712 - protein, 21 aa, Homo sapiens
RDCYYDNSTTCPKCARLSLRK

SEQ ID NO: 1713 - protein, 18 aa, Homo sapiens
TQIINGSVDVDTEDRQKR

SEQ ID NO: 1714 - protein, 16 aa, Homo sapiens
KNESNLGDLLLGFLKY

SEQ ID NO: 1715 - protein, 14 aa, Homo sapiens
MLFNVENGTPASRE

SEQ ID NO: 1716 - protein, 33 aa, Homo sapiens
VPTVFAFQDPTQQVRENTDPASERGNASSSQKE

SEQ ID NO: 1717 - protein, 16 aa, Homo sapiens
GCNHNSTQILVNCLRA

SEQ ID NO: 1718 - protein, 26 aa, Homo sapiens
MQTTDLEQTSPPVNQAPNQTKLEVKA

SEQ ID NO: 1719 - protein, 19 aa, Homo sapiens
KMPPGINSSQSLPVDNHEK

SEQ ID NO: 1720 - protein, 25 aa, Homo sapiens
RTSNGQPVKTAGEITQHNVTELLRD

SEQ ID NO: 1721 - protein, 22 aa, Homo sapiens
RVFTEEAKDSLNTSENDSEHQT

SEQ ID NO: 1722 - protein, 23 aa, Homo sapiens
MLISVESPNLTTPITSNPTDTRK

SEQ ID NO: 1723 - protein, 34 aa, Homo sapiens
RTSHGEPKSAVPFNQYLPNKSNQTAYVPAPLRKK

SEQ ID NO: 1724 - protein, 20 aa, Homo sapiens
DSSPEHNLTKIANGVPNSKG

SEQ ID NO: 1725 - protein, 25 aa, Homo sapiens
QQTTNTTSTQMTNIGVYVSNMTDKL

SEQ ID NO: 1726 - protein, 19 aa, Homo sapiens
RNINGLFLPPSSNITLQKE

SEQ ID NO: 1727 - protein, 19 aa, Homo sapiens
KILQPNTTDEFVIPLDPRW

SEQ ID NO: 1728 - protein, 35 aa, Homo sapiens
MGTPSQTSQDTSLETGQGYEDEQDGWNSSSKTTRV

SEQ ID NO: 1729 - protein, 32 aa, Homo sapiens
KSYRNSSYENARENSQMNESAPGTYVVQNPHS

SEQ ID NO: 1730 - protein, 30 aa, Homo sapiens
MKDFLTDRSNQSHLVGVPKPGVPQTPVNKI

SEQ ID NO: 1731 - protein, 24 aa, Homo sapiens
MRANGNTTSNKNSAAMDAEIVLRS

SEQ ID NO: 1732 - protein, 30 aa, Homo sapiens
RFGSGAAGGSGSSNSSGDALVTRISILLRD

SEQ ID NO: 1733 - protein, 28 aa, Homo sapiens
RSLTYLSINCTSISLNMFSLLHDILHEP

SEQ ID NO: 1734 - protein, 32 aa, Homo sapiens
MTNGTLEPAAEWSVLLGVHSQDGPLDGAHTRA

SEQ ID NO: 1735 - protein, 22 aa, Homo sapiens
KNNSYSLAFLAGKLNSKVERSQ

SEQ ID NO: 1736 - protein, 32 aa, Homo sapiens
KDYPSNTTSSTSNSGNETSGSSTIGETSKKKR

SEQ ID NO: 1737 - protein, 36 aa, Homo sapiens
RHMDMLTAADRLPTQAPLSTSQSVSGKNMTASQGPC

SEQ ID NO: 1738 - protein, 22 aa, Homo sapiens
PDRNCSWALGPPGAALELTFRL

SEQ ID NO: 1739 - protein, 19 aa, Homo sapiens
KNKAQNITAPESEAICWQL

SEQ ID NO: 1740 - protein, 25 aa, Homo sapiens
RKATMAGGLANLQDLENTTPAQPKN

SEQ ID NO: 1741 - protein, 27 aa, Homo sapiens
RSPTQGYRVTPDAVHSVGGNSSQSSSP

SEQ ID NO: 1742 - protein, 23 aa, Homo sapiens
RGRDGGEGCSWMFQPMNNSKMRV

SEQ ID NO: 1743 - protein, 16 aa, Homo sapiens
KVDTNTENSVNTMNRS

SEQ ID NO: 1744 - protein, 27 aa, Homo sapiens
KQHLQINWTGLTNLLDAPGINDVSDSL

SEQ ID NO: 1745 - protein, 11 aa, Homo sapiens
REEQFNSTFRV

SEQ ID NO: 1746 - protein, 18 aa, Homo sapiens
KMDFLLFNYSAPSYLRLL

SEQ ID NO: 1747 - protein, 19 aa, Homo sapiens
MNISLAFFLYDLLSLMDRG

SEQ ID NO: 1748 - protein, 28 aa, Homo sapiens
EALAAMQDPEVMVAFQDVAQNPANMSKY

SEQ ID NO: 1749 - protein, 38 aa, Homo sapiens [sequence omitted]

SEQ ID NO: 1750 - protein, 22 aa, Homo sapiens
KVANNVTEFIFLGLSQDSGMRW

SEQ ID NO: 1751 - protein, 14 aa, Homo sapiens
MGDVNQSVASDFIL

SEQ ID NO: 1752 - protein, 25 aa, Homo sapiens
MTLVSFFSFLSKPLIMLLSNSSWRL

SEQ ID NO: 1753 - protein, 18 aa, Homo sapiens
SNLSFIDVCYISSTVPKM

SEQ ID NO: 1754 - protein, 36 aa, Homo sapiens
RYPIIMNKVVYVLLTSVSWLSGGINSTVQTSLAMRW

SEQ ID NO: 1755 - protein, 24 aa, Homo sapiens
MSFLNGTSLTPASFILNGIPGLED

SEQ ID NO: 1756 - protein, 24 aa, Homo sapiens
RCPQCDCITLQNVSAGLNHHQTFS

SEQ ID NO: 1757 - protein, 21 aa, Homo sapiens
RANNSDFGLVAAVFTNDINKA

SEQ ID NO: 1758 - protein, 21 aa, Homo sapiens
RFRTVNSTSWMEVNFAKNRKD

SEQ ID NO: 1759 - protein, 15 aa, Homo sapiens
KFNKSLGHGLINKKR

SEQ ID NO: 1760 - protein, 22 aa, Homo sapiens
KGNCEDYLMISCNNSDGIENRN

SEQ ID NO: 1761 - protein, 31 aa, Homo sapiens
KERPISMINEASNYNVTSDYAVHPMSPVGRT

SEQ ID NO: 1762 - protein, 23 aa, Homo sapiens
RGVEGPQGSPRPPAPIQQLNRSS

SEQ ID NO: 1763 - protein, 15 aa, Homo sapiens
VFNILFVTSENGSRN

SEQ ID NO: 1764 - protein, 14 aa, Homo sapiens
EDDFQHSSNSTYRT

SEQ ID NO: 1765 - protein, 22 aa, Homo sapiens
KERIINYANSSDPTSGVSKRKS

SEQ ID NO: 1766 - protein, 22 aa, Homo sapiens
KSMADVLGDGGNSSLTISEGPI

SEQ ID NO: 1767 - protein, 24 aa, Homo sapiens
RWQALVQVQPSVDPTNATGLDGRE

SEQ ID NO: 1768 - protein, 27 aa, Homo sapiens
KASPSENNAGGGSPSSGSGGNPTNTSG

SEQ ID NO: 1769 - protein, 28 aa, Homo sapiens
MRKLHLGSSLDSSNASVSSSLSLASQKD

SEQ ID NO: 1770 - protein, 17 aa, Homo sapiens
RSSSFGSVSTSSNSSKG

SEQ ID NO: 1771 - protein, 24 aa, Homo sapiens
KDPRNLLANQTLVYSQDLGEMTKL

SEQ ID NO: 1772 - protein, 18 aa, Homo sapiens
KTGTDSNSTESSETSTGS

SEQ ID NO: 1773 - protein, 24 aa, Homo sapiens
KRTIYLNITNTLNITNNNYYSVEV

SEQ ID NO: 1774 - protein, 27 aa, Homo sapiens
KAGHQVMVFVHARNATVRTAMSLIERA

SEQ ID NO: 1775 - protein, 27 aa, Homo sapiens
RVKVQDLVLEPTQNITTKGVSVRRKRQ

SEQ ID NO: 1776 - protein, 19 aa, Homo sapiens
MNSNLPAENLTIAVNMTKT

SEQ ID NO: 1777 - protein, 22 aa, Homo sapiens
WEDTQNASQNKIKIVGLGLLRV

SEQ ID NO: 1778 - protein, 29 aa, Homo sapiens
KRRKELGAMAFSTTAINFSTVNSSAGFRS

SEQ ID NO: 1779 - protein, 19 aa, Homo sapiens
KKLCGENDRLNHTYSQLLK

SEQ ID NO: 1780 - protein, 26 aa, Homo sapiens
MNQNAQLLIQQSSLENENESVIKERE

SEQ ID NO: 1781 - protein, 20 aa, Homo sapiens
KNFSSLHTVFCATGGGAYKF

SEQ ID NO: 1782 - protein, 13 aa, Homo sapiens
CLNLSNTTITNRT

SEQ ID NO: 1783 - protein, 24 aa, Homo sapiens
RYMIYEFWENSSVWNSHLQTNYSK

SEQ ID NO: 1784 - protein, 29 aa, Homo sapiens
MASFLKNVSATVSINGSGISGNTAINYKH

SEQ ID NO: 1785 - protein, 22 aa, Homo sapiens
KNSSEFPLFSYNNGVVMTSCRE

SEQ ID NO: 1786 - protein, 32 aa, Homo sapiens
KKRQEENSQNSSEKVMFQSTHILPDEEKMVKE

SEQ ID NO: 1787 - protein, 18 aa, Homo sapiens
RNMYTVQNNSGPYFNPRS

SEQ ID NO: 1788 - protein, 16 aa, Homo sapiens
KAKAVALDSDNISLKS

SEQ ID NO: 1789 - protein, 30 aa, Homo sapiens
RQNSSDSISSLNSITSHSSIGSSKDADAKK

SEQ ID NO: 1790 - protein, 18 aa, Homo sapiens
KQKSLTNLSFLTDSEKKL

SEQ ID NO: 1791 - protein, 23 aa, Homo sapiens
RLEVHYHNPLVIEGRNDSSGIRL

SEQ ID NO: 1792 - protein, 18 aa, Homo sapiens
RSLEAINGSGLQMGLQRV

SEQ ID NO: 1793 - protein, 16 aa, Homo sapiens
KALYSFAPISMHCNKS

SEQ ID NO: 1794 - protein, 34 aa, Homo sapiens
KMNMNVMEEAIGYFEQQLAMLQQLSGNESVLDRG

SEQ ID NO: 1795 - protein, 27 aa, Homo sapiens
RFVEGTNINRSLLALGNVINALADSKR

SEQ ID NO: 1796 - protein, 22 aa, Homo sapiens
SLSNIVRNLTPAPLTSTPPLRS

SEQ ID NO: 1797 - protein, 12 aa, Homo sapiens
RGHNLSRDELRG

SEQ ID NO: 1798 - protein, 28 aa, Homo sapiens
RLFLGNYTGNVGNDALQYHNNTAFSTKD

SEQ ID NO: 1799 - protein, 14 aa, Homo sapiens
KYKPLNTTPNATKE

SEQ ID NO: 1800 - protein, 26 aa, Homo sapiens
PDFRNMTGLVDLTLSRNAITRIGARA

SEQ ID NO: 1801 - protein, 21 aa, Homo sapiens
KLKGAILTTMLATRNFSAAKS

SEQ ID NO: 1802 - protein, 23 aa, Homo sapiens
MASYLETMNITLKQQLVKVYEKY

SEQ ID NO: 1803 - protein, 16 aa, Homo sapiens
KLLKEQAHNLTIEMKN

SEQ ID NO: 1804 - protein, 29 aa, Homo sapiens
MMSNQYVPVKTHEEVKMTLNDTLAKTNRE

SEQ ID NO: 1805 - protein, 25 aa, Homo sapiens
MNNSLDYLAYPVIVSNHRQSTTFRK

SEQ ID NO: 1806 - protein, 21 aa, Homo sapiens
GDYEPIDATGFINISSLRLKE

SEQ ID NO: 1807 - protein, 32 aa, Homo sapiens
KEMEEFVQSSGENGVVVFSLGSMVSNMTAERA

SEQ ID NO: 1808 - protein, 29 aa, Homo sapiens
KHTGPGILSMANAGLNTNGSQFFICTAKT

SEQ ID NO: 1809 - protein, 29 aa, Homo sapiens
KGSCFHSIIPGFMCQGGDFTLLNGTGGKS

SEQ ID NO: 1810 - protein, 29 aa, Homo sapiens
RLGTFTTQNASAPRNPETPGSPVPPSGRP

SEQ ID NO: 1811 - protein, 19 aa, Homo sapiens
MHSSNFSSSNGSTEDLFRD

SEQ ID NO: 1812 - protein, 14 aa, Homo sapiens
KQENSSQENENKTK

SEQ ID NO: 1813 - protein, 20 aa, Homo sapiens
KNIKHSGNITFDEIVNLARQ

SEQ ID NO: 1814 - protein, 34 aa, Homo sapiens
MERESLKSPFTGDTSMNNLETVHHNNSKADKLKE

SEQ ID NO: 1815 - protein, 28 aa, Homo sapiens
PFKYIYELNNVTPLDNLLNLSNEILNAS

SEQ ID NO: 1816 - protein, 37 aa, Homo sapiens
KALRTDYNASVSVPDSSGPEHILSISAGIDTIGEILK

SEQ ID NO: 1817 - protein, 17 aa, Homo sapiens
MDQMAVLLVSNINESKG

SEQ ID NO: 1818 - protein, 19 aa, Homo sapiens
RDLHNMQNGSTLVCTLTRE

SEQ ID NO: 1819 - protein, 21 aa, Homo sapiens
KSFNCNSSLIKHWRVHTGERP

SEQ ID NO: 1820 - protein, 21 aa, Homo sapiens
KSFSLNRTLTVHQRIHTGEKP

SEQ ID NO: 1821 - protein, 24 aa, Homo sapiens
KGDFESQNSSLESSISQVINLEKN

SEQ ID NO: 1822 - protein, 38 aa, Homo sapiens
  VARIANT (1)...(38): Xaa = Any Amino Acid
RESTGAQVXMAGDMLPNSTEQAITIAGIPQSIIECVKQ

SEQ ID NO: 1823 - protein, 21 aa, Homo sapiens
MDPNCSCAASDSCTCAGSCKC

SEQ ID NO: 1824 - protein, 31 aa, Homo sapiens
LLKANNTLLKMGYHFELPGPRMVVTNLLTRN

SEQ ID NO: 1825 - protein, 25 aa, Homo sapiens
KHGNLRNVLILMDQSAWDSNATLRQ

SEQ ID NO: 1826 - protein, 26 aa, Homo sapiens
KNGSGNAIIIVVGGAAESLSSMPGKN

SEQ ID NO: 1827 - protein, 30 aa, Homo sapiens
KGTSSSPLAVASGPAKSSSMTTLAKNVTNK

SEQ ID NO: 1828 - protein, 21 aa, Homo sapiens [sequence omitted]

SEQ ID NO: 1829 - protein, 25 aa, Homo sapiens
RWHINFTTFFIDCMAAFGLAYDQKK

SEQ ID NO: 1830 - protein, 30 aa, Homo sapiens
RGGNFSGRGGFGGSHGGGGYGGSGDGYNGF

SEQ ID NO: 1831 - protein, 29 aa, Homo sapiens
KKLSNGSIVPLEDSLNLIEVATEVPKRKT

SEQ ID NO: 1832 - protein, 33 aa, Homo sapiens
RSQSANQVCGYVKSNSLLSSNCSTWKYFICEKY

SEQ ID NO: 1833 - protein, 20 aa, Homo sapiens
ENIMAGATVLFLNATDLDRS

SEQ ID NO: 1834 - protein, 27 aa, Homo sapiens
MSQSMGGDNLSSLDTNEAEIEPENMRE

SEQ ID NO: 1835 - protein, 25 aa, Homo sapiens
RKENSFLTHQHGNDSEAEGEVVCRL

SEQ ID NO: 1836 - protein, 29 aa, Homo sapiens
KENSTLNCASFTAGIVEAVLTHSGFPAKV

SEQ ID NO: 1837 - protein, 21 aa, Homo sapiens
RTPNSSCSTPSRTSSGLFPRI

SEQ ID NO: 1838 - protein, 24 aa, Homo sapiens
MQQFLYEISNLDTLTNSSSFEGYI

SEQ ID NO: 1839 - protein, 32 aa, Homo sapiens
RLNSSSVSNLAAVGDLLHSSQASLTAALGLRP

SEQ ID NO: 1840 - protein, 20 aa, Homo sapiens
RRLEGTNVTVNVLHPGIVRT

SEQ ID NO: 1841 - protein, 19 aa, Homo sapiens
DSFSQASNVTSQLPGFPKY

SEQ ID NO: 1842 - protein, 18 aa, Homo sapiens
KLNQLYNCSSSLSFMDSC

SEQ ID NO: 1843 - protein, 25 aa, Homo sapiens
YTPTGEPVFGGLPQNASLIAHLART

SEQ ID NO: 1844 - protein, 29 aa, Homo sapiens
HGRYIASIMENGSLNIYSVQALTQEINKE

SEQ ID NO: 1845 - protein, 15 aa, Homo sapiens
MIMIMNGTLYIAARD

SEQ ID NO: 1846 - protein, 24 aa, Homo sapiens
REDCNGIFRINVSVSKNLNLKLRP

SEQ ID NO: 1847 - protein, 17 aa, Homo sapiens
EVFENLDGDLGNSTEKQ

SEQ ID NO: 1848 - protein, 20 aa, Homo sapiens
KYFEEGLQDGNDTFALLGKA

SEQ ID NO: 1849 - protein, 31 aa, Homo sapiens
QSTMLDTNSWIFACINSTSMCLQGVDLSWKA

SEQ ID NO: 1850 - protein, 21 aa, Homo sapiens
RSCRAAQAMDCEVNNGSSLRD

SEQ ID NO: 1851 - protein, 36 aa, Homo sapiens
LAPNQYVISGEVAILNSTTIEISELPVRTWTQTYKE

SEQ ID NO: 1852 - protein, 18 aa, Homo sapiens
RTALFPDLLAQGNASLRL

SEQ ID NO: 1853 - protein, 18 aa, Homo sapiens
MMLGDAKIGNNSVSSLKN

SEQ ID NO: 1854 - protein, 20 aa, Homo sapiens
KNITDELGVLGVAGPQARKV

SEQ ID NO: 1855 - protein, 21 aa, Homo sapiens
MLQYYLNLTEANLKGESIWKL

SEQ ID NO: 1856 - protein, 13 aa, Homo sapiens
RENISDPTSPLRT

SEQ ID NO: 1857 - protein, 20 aa, Homo sapiens
PPNNVSVPLLMPLVTLMERQ

SEQ ID NO: 1858 - protein, 17 aa, Homo sapiens
KLNSSSSSSSNSSNERE

SEQ ID NO: 1859 - protein, 12 aa, Homo sapiens
KQNNTNANKPKK

SEQ ID NO: 1860 - protein, 27 aa, Homo sapiens
KQQFNTQNQSNVMPGPAQIMRGPTPNM

SEQ ID NO: 1861 - protein, 26 aa, Homo sapiens
KINCIRPDAFQDLQNLSLLSLYDNKI

SEQ ID NO: 1862 - protein, 21 aa, Homo sapiens
KWSCTEASNTSPTMSAAQNAE

SEQ ID NO: 1863 - protein, 14 aa, Homo sapiens
NQAGDTSNQSSGPH

SEQ ID NO: 1864 - protein, 19 aa, Homo sapiens
KLLEENETEAVTVPTPSPT

SEQ ID NO: 1865 - protein, 15 aa, Homo sapiens
KNASGTKAVSVMVKV

SEQ ID NO: 1866 - protein, 27 aa, Homo sapiens
ESFVEMSSSSFMGISNMTQLESSTSKM

SEQ ID NO: 1867 - protein, 22 aa, Homo sapiens
KWRRPDYDGGSPNLSYHVERRL

SEQ ID NO: 1868 - protein, 22 aa, Homo sapiens
KVNRYDAGKYTIEAENQSGKKS

SEQ ID NO: 1869 - protein, 16 aa, Homo sapiens
RANHTPESCPETKYKV

SEQ ID NO: 1870 - protein, 27 aa, Homo sapiens
KLVQDVANNTNEETGDGPTTATVLARS

SEQ ID NO: 1871 - protein, 17 aa, Homo sapiens
KALTSETNGTDSNGSNS

SEQ ID NO: 1872 - protein, 35 aa, Homo sapiens
MFCNQQSVCDPPSQNNAANISMVQAASAGPPSLRK

SEQ ID NO: 1873 - protein, 35 aa, Homo sapiens
RNIYQPPEGNASVIQDFTEDGHLLHTFYLGTGRRV

SEQ ID NO: 1874 - protein, 19 aa, Homo sapiens
KLRPVTLTEMNYSKYGAKE

SEQ ID NO: 1875 - protein, 21 aa, Homo sapiens
RSCNDFGSYNNQSSNFGPMKA

SEQ ID NO: 1876 - protein, 16 aa, Homo sapiens
GVGAFNLTLSMLPTRI

SEQ ID NO: 1877 - protein, 15 aa, Homo sapiens
RFNGSGSGTDFTLKI

SEQ ID NO: 1878 - protein, 30 aa, Homo sapiens
KNKTTCLRGSDTAALVPVPLATPLLLEGRS

SEQ ID NO: 1879 - protein, 28 aa, Homo sapiens
CALSLFLMAVNIKTPVVVENITLMCLRI

SEQ ID NO: 1880 - protein, 28 aa, Homo sapiens
KAMEEFFSDSGELVQIMMATANENLSAK

SEQ ID NO: 1881 - protein, 30 aa, Homo sapiens
RADKGPVTSILPSQVNSSPVINHLLLGKKM

SEQ ID NO: 1882 - protein, 26 aa, Homo sapiens
KREEEEEEEGSIMNGSTAEDEEQTRS

SEQ ID NO: 1883 - protein, 18 aa, Homo sapiens
KYLKEAPLASSANGTEKN

SEQ ID NO: 1884 - protein, 23 aa, Homo sapiens
MMATPNQTACNAESPVALEEAKT

SEQ ID NO: 1885 - protein, 28 aa, Homo sapiens
RHPQVLQATQETLQRHGVGAGGTRNISG

SEQ ID NO: 1886 - protein, 18 aa, Homo sapiens
RDFDQNMNDSCEDALANK

SEQ ID NO: 1887 - protein, 22 aa, Homo sapiens
RFCTQTLGVDKGYKNQSFYRKH

SEQ ID NO: 1888 - protein, 22 aa, Homo sapiens
RGNVNGTFIIHPDSGNLTVARS

SEQ ID NO: 1889 - protein, 27 aa, Homo sapiens
RLVLGTPQSNSPFGAAVGEQNETLIRI

SEQ ID NO: 1890 - protein, 24 aa, Homo sapiens
KYPLMQRMTNSSSSPSLLNDSAKP

SEQ ID NO: 1891 - protein, 39 aa, Homo sapiens
KGHPNRSALSLPPGLRIGPSGIPQAGLGVWNEASDLPLG

SEQ ID NO: 1892 - protein, 23 aa, Homo sapiens
KDGNASGTMLLEALDCILPPTRP

SEQ ID NO: 1893 - protein, 26 aa, Homo sapiens
GKGFICEFCQNTTVIFPFQTATCRRC

SEQ ID NO: 1894 - protein, 24 aa, Homo sapiens
VIVGVPPDSQNLSMNPMLLLTGRT

SEQ ID NO: 1895 - protein, 26 aa, Homo sapiens
ENYLEFGLETGFTNFSDSAMQFLEKQ

SEQ ID NO: 1896 - protein, 39 aa, Homo sapiens
TITMIPNTLTGMQPLHTFNTFSGGQNSTNLPHGHSTTRV

SEQ ID NO: 1897 - protein, 24 aa, Homo sapiens
RNEKCNENYTTDFIFNLYSEEGKG

SEQ ID NO: 1898 - protein, 25 aa, Homo sapiens
KGIVVLIDPLAANGTTDMHTSVPRV

SEQ ID NO: 1899 - protein, 32 aa, Homo sapiens
RKAASTLSDTKNMEIINSTIETLAPDSPFDHK

SEQ ID NO: 1900 - protein, 22 aa, Homo sapiens
KQHGVNVSVNASATPFQQPSGY

SEQ ID NO: 1901 - protein, 29 aa, Homo sapiens
KHNSSSSALLNSPTVTTSSCAGASEKKKF

SEQ ID NO: 1902 - protein, 17 aa, Homo sapiens
KLALLNASLVKGNLSRV

SEQ ID NO: 1903 - protein, 26 aa, Homo sapiens
RANGTAGPTEDHTDDFLGCLNIPVRE

SEQ ID NO: 1904 - protein, 27 aa, Homo sapiens
PTSSMNVSMMTPINDLHTADSLNLAKG

SEQ ID NO: 1905 - protein, 38 aa, Homo sapiens
WAQNGSMSQPLGESPATATATATATTRPSPTTPAMPKM

SEQ ID NO: 1906 - protein, 16 aa, Homo sapiens
LATLGTTALNNSNPKD

SEQ ID NO: 1907 - protein, 19 aa, Homo sapiens
MQKSTNSDTSVETLNSTRQ

SEQ ID NO: 1908 - protein, 21 aa, Homo sapiens
KLASNGTPMGTFAPLWEVFRV

SEQ ID NO: 1909 - protein, 19 aa, Homo sapiens
RCNISLPMENGLNSIEWRL

SEQ ID NO: 1910 - protein, 34 aa, Homo sapiens
KVNATNFQALAAEFGGESFTSTFQTQSPPSFYRA

SEQ ID NO: 1911 - protein, 25 aa, Homo sapiens
RYQEAAPNVANNTGPHAASCFGAKK

SEQ ID NO: 1912 - protein, 27 aa, Homo sapiens
RECFNIGNFNSMMAIISGMNLSPVARL

SEQ ID NO: 1913 - protein, 14 aa, Homo sapiens
RDNTSVYHISGKKK

SEQ ID NO: 1914 - protein, 23 aa, Homo sapiens
ARTTFNFSIGVLQAECLTSKGRE

SEQ ID NO: 1915 - protein, 20 aa, Homo sapiens
KCPKPMEENHSVSHKKSKKK

SEQ ID NO: 1916 - protein, 21 aa, Homo sapiens
RGRPALPNPEGRAREPCPNRT

SEQ ID NO: 1917 - protein, 25 aa, Homo sapiens
KEMYQPEDDNNSDVTSDDDMTRNRR

SEQ ID NO: 1918 - protein, 27 aa, Homo sapiens
MVHMPDSLGGGPEGPCFCPTPCNLTRY

SEQ ID NO: 1919 - protein, 27 aa, Homo sapiens
AHVCNDTNKMTLINPQGAKLNIYKRKV

SEQ ID NO: 1920 - protein, 21 aa, Homo sapiens
KQTESSFMAGDINSTPTLNRG

SEQ ID NO: 1921 - protein, 24 aa, Homo sapiens
KTLVLSNLSYSATEETLQEVFEKA

SEQ ID NO: 1922 - protein, 22 aa, Homo sapiens
KKDAENHEAQLKNGSLDQGSRI

SEQ ID NO: 1923 - protein, 27 aa, Homo sapiens
RGRPFPLALLGWAPSNITFALLFGRRF

SEQ ID NO: 1924 - protein, 26 aa, Homo sapiens
KSLIEGVISGYNATVFAYGPTGCGKT

SEQ ID NO: 1925 - protein, 33 aa, Homo sapiens
KTFKNESENTCQDMTFSTWTPPPGVHSQTLSRF

SEQ ID NO: 1926 - protein, 34 aa, Homo sapiens
DVNLSKTEKMGNTVESEHLSELTEEEYEAHYIRR

SEQ ID NO: 1927 - protein, 27 aa, Homo sapiens
RLGSSKSGDNSSSSLGDVVTGTRRPTP

SEQ ID NO: 1928 - protein, 29 aa, Homo sapiens
KLLVNLADHNGNTALHYSVSHSNFSIVKL

SEQ ID NO: 1929 - protein, 34 aa, Homo sapiens
RNFSLPDICEEDPGAPAGAVELPGAWVPGAGQRH

SEQ ID NO: 1930 - protein, 37 aa, Homo sapiens
RSMPEASDQEEHLSPLDFLHSANFSLGSINQRLNKRE

SEQ ID NO: 1931 - protein, 28 aa, Homo sapiens
KKHELKPNNPTEEGLASIHSVLFRKDPF

SEQ ID NO: 1932 - protein, 18 aa, Homo sapiens
KQLFTLQTVNSNGTSDRT

SEQ ID NO: 1933 - protein, 27 aa, Homo sapiens
KSLTTECHLLDSPGLNCSNPFTQLERR

SEQ ID NO: 1934 - protein, 25 aa, Homo sapiens
KSHISNHTALENCVSLLCIRADELQ

SEQ ID NO: 1935 - protein, 25 aa, Homo sapiens
KAFHTEISSSDNNTLTSSNAYNSRY

SEQ ID NO: 1936 - protein, 25 aa, Homo sapiens
KSVSTSSPAGAAIASTSGASNNSSS

SEQ ID NO: 1937 - protein, 27 aa, Homo sapiens
KDRIATINYTVLTSVLNPFIYSLRNKD

SEQ ID NO: 1938 - protein, 21 aa, Homo sapiens
RRCIIVGNGGVLANKSLGSRI

SEQ ID NO: 1939 - protein, 19 aa, Homo sapiens
RNTTSTCIATVVGLTGARL

SEQ ID NO: 1940 - protein, 28 aa, Homo sapiens
MENFTALFGAQADPPPPPTALGFGPGKP

SEQ ID NO: 1941 - protein, 21 aa, Homo sapiens
DDSTEAHEGDPTNGSGEQSKT

SEQ ID NO: 1942 - protein, 26 aa, Homo sapiens
LLSPNLTDEQAMLEDTLVALFDLEKV

SEQ ID NO: 1943 - protein, 27 aa, Homo sapiens
RMSMLASQQNQSGPSGNNQSQGNMQRE

SEQ ID NO: 1944 - protein, 41 aa, Homo sapiens
RNNSYSGSNSGAAIGWESASGNGFNGGSGSSMDSQSSGWEM

SEQ ID NO: 1945 - protein, 37 aa, Homo sapiens
GNYNNSSNFGTMKVGNFGGRNSGSYGVGGQYFAKPRH

SEQ ID NO: 1946 - protein, 13 aa, Homo sapiens
RRENNSPSNLPRP

SEQ ID NO: 1947 - protein, 18 aa, Homo sapiens
RSVTLQIYNHSLTLSARW

SEQ ID NO: 1948 - protein, 36 aa, Homo sapiens
RFDFQGTCEYLLSAPCHGPPLGAENFTVTVANEHRG

SEQ ID NO: 1949 - protein, 14 aa, Homo sapiens
MMLQNILQINRSKR

SEQ ID NO: 1950 - protein, 28 aa, Homo sapiens
RCSHGMVEANGLIYVCGGSLGNNVSGRV

SEQ ID NO: 1951 - protein, 17 aa, Homo sapiens
KAPLNETGEVVNEKAKT

SEQ ID NO: 1952 - protein, 28 aa, Homo sapiens
KIEEEEEEENGDSVVQNNNTSQMSHKKV

SEQ ID NO: 1953 - protein, 30 aa, Homo sapiens
RKMLLWAMSVTLEQNLTCPGSDLKPFTTRL

SEQ ID NO: 1954 - protein, 27 aa, Homo sapiens
KLLNSNKSGAAFNQSKSLTLPQTCNRE

SEQ ID NO: 1955 - protein, 27 aa, Homo sapiens
RGENAYSTVLNISQSANLQFASLIQKE

SEQ ID NO: 1956 - protein, 18 aa, Homo sapiens
LFTMHNNRSLTIHQAMRG

SEQ ID NO: 1957 - protein, 18 aa, Homo sapiens
DDNSTFNSTQSHMDWGKV

SEQ ID NO: 1958 - protein, 22 aa, Homo sapiens
MLFTNEDNPHGNDSAKASRART

SEQ ID NO: 1959 - protein, 25 aa, Homo sapiens
RRGAQSPGVMNGTPSTAGFLVAWPM

SEQ ID NO: 1960 - protein, 32 aa, Homo sapiens
KMENESATEGEDSAMTDMPPTEEVTDIVEMRE

SEQ ID NO: 1961 - protein, 26 aa, Homo sapiens
KVPWYVLAGNHDHLGNVSAQIAYSKI

SEQ ID NO: 1962 - protein, 32 aa, Homo sapiens
KHLEGISDEDIINITLPTGVPILLELDENLRA

SEQ ID NO: 1963 - protein, 32 aa, Homo sapiens
RCQKLELLLMDNLRDKLRPIIISMNYSLPLRM

SEQ ID NO: 1964 - protein, 35 aa, Homo sapiens
RHQGTVTEDKNNASHVVYPVPGNLEEEEWVRPVMK

SEQ ID NO: 1965 - protein, 17 aa, Homo sapiens
KMSNYSLLSVDYVVDKA

SEQ ID NO: 1966 - protein, 25 aa, Homo sapiens
KAINNSFAPEKLQELAFQTIQEIRH

SEQ ID NO: 1967 - protein, 13 aa, Homo sapiens
RKNKSVWITISST

SEQ ID NO: 1968 - protein, 18 aa, Homo sapiens
RLMRQLLVINESIESIKW

SEQ ID NO: 1969 - protein, 18 aa, Homo sapiens
KLDNLMLELDGTENKSKF

SEQ ID NO: 1970 - protein, 17 aa, Homo sapiens
LANLVGNLGIGNGTTKN

SEQ ID NO: 1971 - protein, 14 aa, Homo sapiens
DKAPVNGTEQTQKT

SEQ ID NO: 1972 - protein, 15 aa, Homo sapiens
ENNVSKGDNGELAKE

SEQ ID NO: 1973 - protein, 14 aa, Homo sapiens
RTLHSTFQPNISRY

SEQ ID NO: 1974 - protein, 24 aa, Homo sapiens
RFGKQAALDPFILLNLLPNSTDKY

SEQ ID NO: 1975 - protein, 28 aa, Homo sapiens
MPKPINVRVTTMDAELEFAIQPNTTGKQ

SEQ ID NO: 1976 - protein, 12 aa, Homo sapiens
RNRTFVLNFIKI

SEQ ID NO: 1977 - protein, 12 aa, Homo sapiens
KEVFVHPNYSKS

SEQ ID NO: 1978 - protein, 20 aa, Homo sapiens
MDFNLSGDSDGSAGVSESRI

SEQ ID NO: 1979 - protein, 30 aa, Homo sapiens
YRPPDRSAPSWNTTGEVVVTMEPEVPIKKL

SEQ ID NO: 1980 - protein, 27 aa, Homo sapiens
HDVTNISTPTHVVFSSSTASTTVGFEW

SEQ ID NO: 1981 - protein, 11 aa, Homo sapiens
IRVGNATIDRE

SEQ ID NO: 1982 - protein, 26 aa, Homo sapiens
EFIHLLSNITGAIVNTDNVQFHVDKK

SEQ ID NO: 1983 - protein, 21 aa, Homo sapiens
RVLDINDNDPVLLNLPMNITI

SEQ ID NO: 1984 - protein, 22 aa, Homo sapiens
LSVIDNASDLPERSVSVPNAKL

SEQ ID NO: 1985 - protein, 19 aa, Homo sapiens
KTRIIDVVYNASNNELVRT

SEQ ID NO: 1986 - protein, 34 aa, Homo sapiens
RQNIAIEVDAFGTRNGTDDPSYNGAIIVSGDEKD

SEQ ID NO: 1987 - protein, 19 aa, Homo sapiens
MSFNCSTRNCSSRPIGGRC

SEQ ID NO: 1988 - protein, 17 aa, Homo sapiens
RNCSHWAVGVASWEMSR

SEQ ID NO: 1989 - protein, 25 aa, Homo sapiens
DSANYSCVYVDLKPPFGGSAPSERL

SEQ ID NO: 1990 - protein, 35 aa, Homo sapiens; identical to SEQ ID NO: 907

SEQ ID NO: 1991 - protein, 19 aa, Homo sapiens
RFQSPAGTEALFELHNISV

SEQ ID NO: 1992 - protein, 36 aa, Homo sapiens
QPSLWAESESLLKPLANVTLTCQAHLETPDFQLFKN

SEQ ID NO: 1993 - protein, 39 aa, Homo sapiens
RRSKSPADSANGTSSSQLSTPKSKQSPISTPTSPGSLRK

SEQ ID NO: 1994 - protein, 19 aa, Homo sapiens
RIGVSFIDDGSNATDLLRK

SEQ ID NO: 1995 - protein, 12 aa, Homo sapiens
KFNPSLNVVDKI

SEQ ID NO: 1996 - protein, 28 aa, Homo sapiens
RFYISKGAVVDQLGGDLNSTPLHWAIRQ

SEQ ID NO: 1997 - protein, 31 aa, Homo sapiens
KNEEIDEMIKEAPGPINFTVFLSMFGEKLKG

SEQ ID NO: 1998 - protein, 13 aa, Homo sapiens
RKTTSNNFTHSRA

SEQ ID NO: 1999 - protein, 29 aa, Homo sapiens
RNSNYTYPIKPAIENWGSDFLCTEWKASN

SEQ ID NO: 2000 - protein, 31 aa, Homo sapiens
RSPAAAILELFEEQNGSLQELHYLMTVMERL

SEQ ID NO: 2001 - protein, 21 aa, Homo sapiens
KNITLLPATAATTFTVTPSGQ

SEQ ID NO: 2002 - protein, 24 aa, Homo sapiens
IELNDSVNENSDTVGQIVHYIMKN

SEQ ID NO: 2003 - protein, 20 aa, Homo sapiens
RDGNGTVDFPEFLGMMARKM

SEQ ID NO: 2004 - protein, 22 aa, Homo sapiens
KLMLVSAPSILSSGNGTAINMT

SEQ ID NO: 2005 - protein, 37 aa, Homo sapiens
KIGLNIGQAIVNTSGTVPAIPSINILQNVTPKGEDKS

SEQ ID NO: 2006 - protein, 30 aa, Homo sapiens
RLPINGANTVIGSNNSVQNVPTPQTFGGKH

SEQ ID NO: 2007 - protein, 23 aa, Homo sapiens
KQSSNRPAHNISHILGHDCSSAV

SEQ ID NO: 2008 - protein, 26 aa, Homo sapiens
RHEKMGSNISQLTDKNELLTEQVHKA

SEQ ID NO: 2009 - protein, 15 aa, Homo sapiens
KEVLLKTNLSGRQSP

SEQ ID NO: 2010 - protein, 20 aa, Homo sapiens
MHVLTAPLLANTTEDKPSKD

SEQ ID NO: 2011 - protein, 31 aa, Homo sapiens
MSSKPEPKDVHQLNGTGPSASPCSSDGPGRE

SEQ ID NO: 2012 - protein, 15 aa, Homo sapiens
RSSTSSIDSNVSSKS

SEQ ID NO: 2013 - protein, 20 aa, Homo sapiens
PTKIGSGRSSPVTVNQTDKE

SEQ ID NO: 2014 - protein, 20 aa, Homo sapiens
MEGFNSGLNSGGSTNSSPKV

SEQ ID NO: 2015 - protein, 16 aa, Homo sapiens
RYATQSNHSGIATSQK

SEQ ID NO: 2016 - protein, 26 aa, Homo sapiens
KYHFSNLVSPTNLSQFNLPGPSMMRS

SEQ ID NO: 2017 - protein, 24 aa, Homo sapiens
RIVESYFMLNSTLYFSYTHMVCRT

SEQ ID NO: 2018 - protein, 25 aa, Homo sapiens
RRQISQKAFLFNSSEQVAEFVISRP

SEQ ID NO: 2019 - protein, 24 aa, Homo sapiens
RVGLFCGIFIVLNITLVLAAVFKL

SEQ ID NO: 2020 - protein, 31 aa, Homo sapiens
KTKLPEYTREALCPPACRGSTTLYNCSTCKG

SEQ ID NO: 2021 - protein, 33 aa, Homo sapiens
RNRSYVFSSLATSAVSFATGALGMWIPLYLHRA

SEQ ID NO: 2022 - protein, 39 aa, Homo sapiens
KLVPSSSYVAVAPVKSSPTTSVPAVSSPPMGNQSGQSVP

SEQ ID NO: 2023 - protein, 18 aa, Homo sapiens
KIENYINESTEAQSEQKE

SEQ ID NO: 2024 - protein, 38 aa, Homo sapiens
KLHCNSACLTNTTHCPEEASVGNPEGAFMKVLQARKNY

SEQ ID NO: 2025 - protein, 18 aa, Homo sapiens
MGHNFSLPVYKGEIQARN

SEQ ID NO: 2026 - protein, 18 aa, Homo sapiens
RVLYMFNQMPLNLTNAVA

SEQ ID NO: 2027 - protein, 18 aa, Homo sapiens
REAFFGGNGKINLTVFKL

SEQ ID NO: 2028 - protein, 14 aa, Homo sapiens
KDNSTACSHPVTKH

SEQ ID NO: 2029 - protein, 28 aa, Homo sapiens
KHELGITAVMNFQTEWDIVQNSSGCNRY

SEQ ID NO: 2030 - protein, 33 aa, Homo sapiens
KKVDAQSSAGKEDMLLSKSPSSLSANISSSPKG

SEQ ID NO: 2031 - protein, 29 aa, Homo sapiens
LFDNAAQPYSNLSNLDVLNQVIRERDTKL

SEQ ID NO: 2032 - protein, 22 aa, Homo sapiens
MAKSALRENGTNSETFRQRFRR

SEQ ID NO: 2033 - protein, 15 aa, Homo sapiens
SQELNFVMDVNSSKY

SEQ ID NO: 2034 - protein, 26 aa, Homo sapiens
RVSTVYANNGSVLQGTSVASVYHGKI

SEQ ID NO: 2035 - protein, 17 aa, Homo sapiens
KALAAAGYDVEKNNSRI

SEQ ID NO: 2036 - protein, 30 aa, Homo sapiens
RSCCEGMICNVELPTNHTNAVFAVMHAQRT

SEQ ID NO: 2037 - protein, 15 aa, Homo sapiens
KHMPPPNMTTNERRV

SEQ ID NO: 2038 - protein, 19 aa, Homo sapiens
KFNSTQIAAMAPEHEEPRI

SEQ ID NO: 2039 - protein, 25 aa, Homo sapiens
HPYYGKTGVNSGVMLMNMTRMRRKY

SEQ ID NO: 2040 - protein, 27 aa, Homo sapiens
CLQKGSLTIQQVNDLLDSIASNNSAKR

SEQ ID NO: 2041 - protein, 16 aa, Homo sapiens
KGNSKAGNGTLENQKG

SEQ ID NO: 2042 - protein, 35 aa, Homo sapiens
KEVDIEGTTVIEVGLDPSNNMTLAVDCVGILKLRN

SEQ ID NO: 2043 - protein, 20 aa, Homo sapiens
KANIQFGDNGTTISAVSNKA

SEQ ID NO: 2044 - protein, 20 aa, Homo sapiens
KHSAGSGAEESNSSSTVQKQ

SEQ ID NO: 2045 - protein, 14 aa, Homo sapiens
KGFNWSSALTKHKR

SEQ ID NO: 2046 - protein, 15 aa, Homo sapiens
KTVNLSVTPSPAPRT

SEQ ID NO: 2047 - protein, 18 aa, Homo sapiens
KFNISNGGPAPEAITDKI

SEQ ID NO: 2048 - protein, 20 aa, Homo sapiens
RVENGSSDENATALPGTWRR

SEQ ID NO: 2049 - protein, 17 aa, Homo sapiens
TERLLGEASSNWSQAKR

SEQ ID NO: 2050 - protein, 30 aa, Homo sapiens
RGPVSSDVEENDSLNLLGILPNNSDSAKKN

SEQ ID NO: 2051 - protein, 26 aa, Homo sapiens
RVEYTGHPLEIAVFLNYCTVCNVTKK

SEQ ID NO: 2052 - protein, 11 aa, Homo sapiens
MNTSTVNSARE

SEQ ID NO: 2053 - protein, 16 aa, Homo sapiens
KDKLDETNNTLRCLKL

SEQ ID NO: 2054 - protein, 20 aa, Homo sapiens
RAAENASLGPTNGSKLMNRQ

SEQ ID NO: 2055 - protein, 24 aa, Homo sapiens
KAFAADTGMNRSQSEYCNVGTKTY

SEQ ID NO: 2056 - protein, 29 aa, Homo sapiens
KSWNKSQNDCAINNSYLMVIQDITAMVRF

SEQ ID NO: 2057 - protein, 25 aa, Homo sapiens
RFIDSSNPGLQISLNVNNTEHVVSI

SEQ ID NO: 2058 - protein, 28 aa, Homo sapiens
KGRIGVVISSYMHFTNVSASADQALDRF

SEQ ID NO: 2059 - protein, 14 aa, Homo sapiens
RGLAGVENVTELKK

SEQ ID NO: 2060 - protein, 36 aa, Homo sapiens
REGGHDVPSNKDVTSLDWNTNGTLLATGSYDGFARI

SEQ ID NO: 2061 - protein, 19 aa, Homo sapiens
KKHHHHAVGLNLSHVRKRC

SEQ ID NO: 2062 - protein, 32 aa, Homo sapiens
RDVMWENYSNFISLGPSISKPDVITLLDEERK

SEQ ID NO: 2063 - protein, 27 aa, Homo sapiens
KLPTQNITFQTESSVAEQEAEFQSPKY

SEQ ID NO: 2064 - protein, 22 aa, Homo sapiens
KAFITNFSMNIDGMTYPGIIKE

SEQ ID NO: 2065 - protein, 24 aa, Homo sapiens
RRLRIHNLGLNCSSQLADLYKSCE

SEQ ID NO: 2066 - protein, 25 aa, Homo sapiens
RVFPYISAMVNNGSLSYDHERDGRP

SEQ ID NO: 2067 - protein, 21 aa, Homo sapiens
KDVQIIVFPEDGIHGFNFTRT

SEQ ID NO: 2068 - protein, 20 aa, Homo sapiens
RYQFNTNVVFSNNGTLVDRY

SEQ ID NO: 2069 - protein, 23 aa, Homo sapiens
KNPVGLIGAENATGETDPSHSKF

SEQ ID NO: 2070 - protein, 11 aa, Homo sapiens
RFNDTEVLQRL

SEQ ID NO: 2071 - protein, 28 aa, Homo sapiens
KWNVNAPPTFHSEMMYDNFTLVPVWGKE

SEQ ID NO: 2072 - protein, 22 aa, Homo sapiens
KCVVEMEGNQTVLHPPPSNTKQ

SEQ ID NO: 2073 - protein, 18 aa, Homo sapiens
DYQVTLQIPAANLSANRK

SEQ ID NO: 2074 - protein, 23 aa, Homo sapiens
RASLNHSTAFNPQPQSQMQDTRQ

SEQ ID NO: 2075 - protein, 19 aa, Homo sapiens
KYNNGSTELHSSSVGLAKA

SEQ ID NO: 2076 - protein, 32 aa, Homo sapiens
KNEKNGTDELDNMNSTERISFLQEKLQEIRKY

SEQ ID NO: 2077 - protein, 18 aa, Homo sapiens
KFIHNENGANYSVTATRS

SEQ ID NO: 2078 - protein, 29 aa, Homo sapiens
DLLRTLNDTLGKLSAIPNDTAAKLQAVKD

SEQ ID NO: 2079 - protein, 20 aa, Homo sapiens
KNESGIILLGSGGTPAPPRR

SEQ ID NO: 2080 - protein, 16 aa, Homo sapiens
RYMQNLTVEQPIEVKK

SEQ ID NO: 2081 - protein, 21 aa, Homo sapiens
KFVDTAGNFSFPVNFSLSLLN

SEQ ID NO: 2082 - protein, 21 aa, Homo sapiens
RVVAEGFDFANGINISPDGKY

SEQ ID NO: 2083 - protein, 24 aa, Homo sapiens
KVTQVYAENGTVLQGSTVASVYKG

SEQ ID NO: 2084 - protein, 12 aa, Homo sapiens
KHANWTLTPLKS

SEQ ID NO: 2085 - protein, 28 aa, Homo sapiens
RLSSSGSNCSSGSEGEPVALHAGICVRQ

SEQ ID NO: 2086 - protein, 14 aa, Homo sapiens
RDNYTDLVAIQNKA

SEQ ID NO: 2087 - protein, 14 aa, Homo sapiens
KIGGIWTWVGTNKS

SEQ ID NO: 2088 - protein, 19 aa, Homo sapiens
RCATPHGDNASLEATFVKR

SEQ ID NO: 2089 - protein, 27 aa, Homo sapiens
RENLSAAFSRQLNVNAKPFVPNVHAAE

SEQ ID NO: 2090 - protein, 25 aa, Homo sapiens
KYHVMAPALSFHMSPWSWSNCSRKY

SEQ ID NO: 2091 - protein, 21 aa, Homo sapiens
RSGQVEVNITAFCQLIYPGKG

SEQ ID NO: 2092 - protein, 37 aa, Homo sapiens
MINNTKAFIHHELLAYLYSSADQSSLMEESADQAQRR

SEQ ID NO: 2093 - protein, 17 aa, Homo sapiens
KANATGGGGHVQMVQRA

SEQ ID NO: 2094 - protein, 9 aa, Homo sapiens
GENGTLSRE

SEQ ID NO: 2095 - protein, 32 aa, Homo sapiens
RNGSLQEKLWAILQATYIHSWNLARFVFTYKG

SEQ ID NO: 2096 - protein, 12 aa, Homo sapiens
KGFSQLSNLTKH

SEQ ID NO: 2097 - protein, 13 aa, Homo sapiens
IFNETKNPTLTRR

SEQ ID NO: 2098 - protein, 18 aa, Homo sapiens
SFSWSGGAFLYPPNMSPT

SEQ ID NO: 2099 - protein, 22 aa, Homo sapiens
DRPPSPTDNISRYSFDNLPEKY

SEQ ID NO: 2100 - protein, 27 aa, Homo sapiens
MTLTNLSGPYSYCNTTLDQIGTCWPRS

SEQ ID NO: 2101 - protein, 29 aa, Homo sapiens
MTMALSVLVTIEMCNALNSLSENQSLLRM

SEQ ID NO: 2102 - protein, 25 aa, Homo sapiens
RMIRTNEAVPKTAPTNVSGRSGRRH

SEQ ID NO: 2103 - protein, 21 aa, Homo sapiens
KTVVTYHIPQNSSLENVDSRY

SEQ ID NO: 2104 - protein, 12 aa, Homo sapiens
KENPSTVGVERV

SEQ ID NO: 2105 - protein, 22 aa, Homo sapiens
ADGAAASNAADSANASLVNAKQ

SEQ ID NO: 2106 - protein, 32 aa, Homo sapiens
RNPSSAAPVQSRGGIGASENLENPPKMGEEEA

SEQ ID NO: 2107 - protein, 26 aa, Homo sapiens
KENITDPPRGCVGNTNIWKTGPLFKR

SEQ ID NO: 2108 - protein, 17 aa, Homo sapiens
RTMNFTYEVHLVADGKF

SEQ ID NO: 2109 - protein, 18 aa, Homo sapiens
PPTLHATAASVAVPNKTC

SEQ ID NO: 2110 - protein, 23 aa, Homo sapiens
RPVDKPINTTLICNVTNALGARQ

SEQ ID NO: 2111 - protein, 42 aa, Homo sapiens
RLVRVTYVSSEGGHSGQTEAPGNATSAMLGPLSSSTTYTVRV

SEQ ID NO: 2112 - protein, 23 aa, Homo sapiens
RAGVVFMAGHVYAVGGFNGSLRV

SEQ ID NO: 2113 - protein, 18 aa, Homo sapiens
RSQSLIFLNLSTNNLLDD

SEQ ID NO: 2114 - protein, 23 aa, Homo sapiens
KMNLTQNTLGYEGIVKLYKVLKS

SEQ ID NO: 2115 - protein, 25 aa, Homo sapiens
MTAMDNASKNASEMIDKLTLTFNRT

SEQ ID NO: 2116 - protein, 17 aa, Homo sapiens
RNCTIVSPDAGGAKRVT

SEQ ID NO: 2117 - protein, 24 aa, Homo sapiens
FIKTSTGKETVNATFPVAIVMLRA

SEQ ID NO: 2118 - protein, 19 aa, Homo sapiens
KEALRAGLNCSTENMPIKI

SEQ ID NO: 2119 - protein, 23 aa, Homo sapiens
KLQNAENDYINASLVDIEEAQRS

SEQ ID NO: 2120 - protein, 25 aa, Homo sapiens
MLQYGGRNRTVATPSHGVWDMRGKQ

SEQ ID NO: 2121 - protein, 34 aa, Homo sapiens
GVSLSSYLEGLMASTISSNASKGREAMEWVIHKL

SEQ ID NO: 2122 - protein, 22 aa, Homo sapiens
KEIYHQNVQNLTHLQVVEVLKQ

SEQ ID NO: 2123 - protein, 13 aa, Homo sapiens
RLATNTSAPDLKN

SEQ ID NO: 2124 - protein, 23 aa, Homo sapiens
KARKSIAQSGVNMCNQNSSPHKN

SEQ ID NO: 2125 - protein, 19 aa, Homo sapiens
KVLNHSPMSDASVNFDYKS

SEQ ID NO: 2126 - protein, 32 aa, Homo sapiens
KLILSQNHSDEEEEEEENEEENLAMAVGMGER

SEQ ID NO: 2127 - protein, 20 aa, Homo sapiens
REHGAQAGEGALKDSNNDTN

SEQ ID NO: 2128 - protein, 31 aa, Homo sapiens
EESRMSGECAPNVSVSVSTSHTTISGGGSRG

SEQ ID NO: 2129 - protein, 15 aa, Homo sapiens
NEINNMSFLTADNKS

SEQ ID NO: 2130 - protein, 17 aa, Homo sapiens
KWRLSNNSVVEIASLRF

SEQ ID NO: 2131 - protein, 23 aa, Homo sapiens
KNPTDEYLDAMMNEAPGPINFTM

SEQ ID NO: 2132 - protein, 16 aa, Homo sapiens
KVLNGTLLMAPSGCKS

SEQ ID NO: 2133 - protein, 28 aa, Homo sapiens
KGRANHSAFLFGFGDGGGGPTQTMLDRL

SEQ ID NO: 2134 - protein, 38 aa, Homo sapiens
KSPIIPECSTNVQTAAGGSNSSQYNSNLTIRLSVSWKG

SEQ ID NO: 2135 - protein, 16 aa, Homo sapiens
RQSSSEQCSNLSSVRR

SEQ ID NO: 2136 - protein, 19 aa, Homo sapiens
KLGVNNISGIEEASNMFTN

SEQ ID NO: 2137 - protein, 26 aa, Homo sapiens
TTNSTNPSPQGSHSAIGLSGLNPSTG

SEQ ID NO: 2138 - protein, 25 aa, Homo sapiens
MFCINICTVYCNNSFPIHSSNSTKK

SEQ ID NO: 2139 - protein, 24 aa, Homo sapiens
RNVTVGPPENIEVTPGEGSLIIRF

SEQ ID NO: 2140 - protein, 14 aa, Homo sapiens
RNATLVNEADKLRA

SEQ ID NO: 2141 - protein, 37 aa, Homo sapiens
RPSAIAAGHGDYALNVTGPILNFFAGHYDTPYPLPKS

SEQ ID NO: 2142 - protein, 24 aa, Homo sapiens
KGPSTPLPEDPNWNVTEFHTTPKM

SEQ ID NO: 2143 - protein, 13 aa, Homo sapiens
KAEFNITLIHPKD

SEQ ID NO: 2144 - protein, 19 aa, Homo sapiens
KVPVTLALNNTLFLIEERQ

SEQ ID NO: 2145 - protein, 35 aa, Homo sapiens
EKNKNANSSPVASTTPSASATTNPASATTLDQSKA

SEQ ID NO: 2146 - protein, 16 aa, Homo sapiens
REENEGVYNGSWGGRG

SEQ ID NO: 2147 - protein, 25 aa, Homo sapiens
HAATTQYANGTVLSGQTTNIVTHRA

SEQ ID NO: 2148 - protein, 25 aa, Homo sapiens
RGTELDDGIQADSGPINDTDANPRY

SEQ ID NO: 2149 - protein, 13 aa, Homo sapiens
SQSGHMLLNLSRG

SEQ ID NO: 2150 - protein, 28 aa, Homo sapiens
KAENDENGQAENFSMDPQLERQVETIRN

SEQ ID NO: 2151 - protein, 26 aa, Homo sapiens
MLTTHPSLYRVDNLSDEGALNISDRT

SEQ ID NO: 2152 - protein, 26 aa, Homo sapiens
RIVTTNVTMPEGPPQNCVTGNITGKS

SEQ ID NO: 2153 - protein, 29 aa, Homo sapiens
LTKRTNMDFSICISNITPADAGTYYCVKF

SEQ ID NO: 2154 - protein, 30 aa, Homo sapiens
  VARIANT (1)...(30): Xaa = Any Amino Acid
RRKLAIENTMAXLVSVGANSAVNNTAESKM

SEQ ID NO: 2155 - protein, 30 aa, Homo sapiens
KRSPIFFNYLYSPLEIEALKPNVNVSSLKK

SEQ ID NO: 2156 - protein, 35 aa, Homo sapiens
RACLGLIYTVYVDSLNVSLESLIANLCACLVPAAG

SEQ ID NO: 2157 - protein, 10 aa, Homo sapiens
PTNETTFAKL

SEQ ID NO: 2158 - protein, 14 aa, Homo sapiens
RRINMSFVEVKDKK

SEQ ID NO: 2159 - protein, 29 aa, Homo sapiens
KYALIIVMMTIMTATDIQLLNQTMENTRQ

SEQ ID NO: 2160 - protein, 34 aa, Homo sapiens
KVGAERNVLIFDLGDDTFNVSILTTEDGIFEVKS

SEQ ID NO: 2161 - protein, 22 aa, Homo sapiens
KKEIYMHTGNSSTPRGEGGSCY

SEQ ID NO: 2162 - protein, 27 aa, Homo sapiens
RIPSYNLTVSVSDNYGAPPGAAVQARS

SEQ ID NO: 2163 - protein, 16 aa, Homo sapiens
KYFWNDTIHNFDFLKG

SEQ ID NO: 2164 - protein, 25 aa, Homo sapiens
RQYKDLWNMSDDKPFLCTAPGCGQR

SEQ ID NO: 2165 - protein, 15 aa, Homo sapiens
KNSSLAEFVQNLSQI

SEQ ID NO: 2166 - protein, 22 aa, Homo sapiens
PVKLGIIGVVNRSQLDINNKKS

SEQ ID NO: 2167 - protein, 23 aa, Homo sapiens
MRPHEDLSEDNSSGEVVMRVTSV

SEQ ID NO: 2168 - protein, 26 aa, Homo sapiens
KALDPSQPVTFVTNSTYAADKGVNKE

SEQ ID NO: 2169 - protein, 28 aa, Homo sapiens
TDDTNVTWLQLETEIEALKEELLLMKKN

SEQ ID NO: 2170 - protein, 29 aa, Homo sapiens
RDRLALANESGVTLMPDGSLHLAALPSRR

SEQ ID NO: 2171 - protein, 25 aa, Homo sapiens
KVLTPEELLYRAVQSVNVTHDAVHA

SEQ ID NO: 2172 - protein, 11 aa, Homo sapiens
MFNISPGAVQF

SEQ ID NO: 2173 - protein, 33 aa, Homo sapiens
RNSINVFASPAHYTSTTGSCNFETSSGNWTTAC

SEQ ID NO: 2174 - protein, 41 aa, Homo sapiens
REACANILIDSGADPNIVGVYGNTAVHYAVNSENLSVVAKL

SEQ ID NO: 2175 - protein, 19 aa, Homo sapiens
KNSSSEQLFSSARLQNEKK

SEQ ID NO: 2176 - protein, 17 aa, Homo sapiens
RTNVLNDAYENLTRYKE

SEQ ID NO: 2177 - protein, 19 aa, Homo sapiens
MCVETFSNYSLLGHFAVRH

SEQ ID NO: 2178 - protein, 20 aa, Homo sapiens
VILSNNNHTEIQEISLALRS

SEQ ID NO: 2179 - protein, 20 aa, Homo sapiens
RMETVSNASSSSNPSSPGRI

SEQ ID NO: 2180 - protein, 21 aa, Homo sapiens
KECQHGGQCQVENGSAVCVCQ

SEQ ID NO: 2181 - protein, 22 aa, Homo sapiens
RVLYMFNQMPLNLTNAVATALQ

SEQ ID NO: 2182 - protein, 23 aa, Homo sapiens
KQPVESSEDSTDDSNSSSGEEER

SEQ ID NO: 2183 - protein, 17 aa, Homo sapiens
KLINYNNSITNSVYSRF

SEQ ID NO: 2184 - protein, 23 aa, Homo sapiens
WNEDYCKLFKNITVEEMNELERQ

SEQ ID NO: 2185 - protein, 23 aa, Homo sapiens
RYTLVFNSSSERNVSLTEHKKKQ

SEQ ID NO: 2186 - protein, 21 aa, Homo sapiens
RNMTLLATIMSGSTMSLNHEA

SEQ ID NO: 2187 - protein, 18 aa, Homo sapiens
RSVTLQIYNHSLTLSARW

SEQ ID NO: 2188 - protein, 36 aa, Homo sapiens
RFNFQGTCEYLLSAPCHGPPLGAENFTVTVANEHRG

SEQ ID NO: 2189 - protein, 18 aa, Homo sapiens
KVTVRPGESVMVNISAKA

SEQ ID NO: 2190 - protein, 14 aa, Homo sapiens
RVITVQVANFTLRL

SEQ ID NO: 2191 - protein, 18 aa, Homo sapiens
RYLPVNSSLLTSDCSERC

SEQ ID NO: 2192 - protein, 17 aa, Homo sapiens
RVVTVAALGTNISIHKD

SEQ ID NO: 2193 - protein, 22 aa, Homo sapiens
RGLCVLSVGANLTTFDGARGAT

SEQ ID NO: 2194 - protein, 20 aa, Homo sapiens
RKPSPQDIAQAVLRNFSGKD

SEQ ID NO: 2195 - protein, 26 aa, Homo sapiens
RSHNASLHPTPEQCEAVSKFIGECKI

SEQ ID NO: 2196 - protein, 26 aa, Homo sapiens
KNNGFFQKLNVTEGAMQDLLKEIIKV

SEQ ID NO: 2197 - protein, 30 aa, Homo sapiens
KLVSSSNAMENASHQASVQVESLQEQLNVV

SEQ ID NO: 2198 - protein, 29 aa, Homo sapiens
KHTVSGILSMANAGPNANSSQFFICAAKT

SEQ ID NO: 2199 - protein, 32 aa, Homo sapiens
RYSKETNIDPSENSTSNLPNCLINQMLSLNRT

SEQ ID NO: 2200 - protein, 26 aa, Homo sapiens
RCRELRNFSSLRAILSALQSNPIYRL

SEQ ID NO: 2201 - protein, 28 aa, Homo sapiens
KNKTSTASSMVASAEQPSGSVEEELSKK

SEQ ID NO: 2202 - protein, 38 aa, Homo sapiens
KHGIEAAFLAMLGLQGNKQVLDLEAGFGAFYANYSPKV

SEQ ID NO: 2203 - protein, 18 aa, Homo sapiens
KNYNDHENNLSAICLVKL

SEQ ID NO: 2204 - protein, 19 aa, Homo sapiens
SQCGKMANKANTSGDFEKD

SEQ ID NO: 2205 - protein, 12 aa, Homo sapiens
RRGASVNRTTRT

SEQ ID NO: 2206 - protein, 19 aa, Homo sapiens
RRGASVNRTTRTNSTPLRA

SEQ ID NO: 2207 - protein, 35 aa, Homo sapiens
RNPPAFGNVSVIALELLNSGYEFDEGSIIFNQFKS

SEQ ID NO: 2208 - protein, 11 aa, Homo sapiens
KTNNVNVSSRV

SEQ ID NO: 2209 - protein, 27 aa, Homo sapiens
RKSEIHGAPVLFQNLSGVHWGYEETKT

SEQ ID NO: 2210 - protein, 23 aa, Homo sapiens
RIIPGFMCQGGGFTCHNGTGGKS

SEQ ID NO: 2211 - protein, 15 aa, Homo sapiens
RLESGMRNMSIHSKT

SEQ ID NO: 2212 - protein, 26 aa, Homo sapiens
RWLGSTGVTCGVRRQISEMNGNISRL

SEQ ID NO: 2213 - protein, 37 aa, Homo sapiens
RDSFGAHTYELLAKPGQFIHTNWTGHGGSVSSSSYNA

SEQ ID NO: 2214 - protein, 19 aa, Homo sapiens
KIIMLPSALDQLSQLNITY

SEQ ID NO: 2215 - protein, 14 aa, Homo sapiens
RKCQLNLTDSENRT

SEQ ID NO: 2216 - protein, 28 aa, Homo sapiens
KENIPGDFLCISLVNSSVQLRYNLGDRT

SEQ ID NO: 2217 - protein, 18 aa, Homo sapiens
MRNLQFTTISLNFSTTKT

SEQ ID NO: 2218 - protein, 23 aa, Homo sapiens
KYDNSLKIISNASCTTNCLAPRA

SEQ ID NO: 2219 - protein, 13 aa, Homo sapiens
MDNVTGGMETSRQ

SEQ ID NO: 2220 - protein, 26 aa, Homo sapiens
RNTFTPGEKVVFTTEINNQTSKCIKT

SEQ ID NO: 2221 - protein, 27 aa, Homo sapiens
MDSVAFEDVAVNFTQEEWALLDPSQKN

SEQ ID NO: 2222 - protein, 16 aa, Homo sapiens
KNAPQNSTQAHSENKC

SEQ ID NO: 2223 - protein, 33 aa, Homo sapiens
RSEASNGSTVAAGTSKSEEGLSSGLGSGVGGKP

SEQ ID NO: 2224 - protein, 29 aa, Homo sapiens
GAEVKFVLKHQNVSEFASSSGGSQLLFKQ

SEQ ID NO: 2225 - protein, 13 aa, Homo sapiens
RKNCSQIALFQKR

SEQ ID NO: 2226 - protein, 17 aa, Homo sapiens
KSTNISFTDMVSADERL

SEQ ID NO: 2227 - protein, 20 aa, Homo sapiens
KMNSSIMANVTKAFVGDSKD

SEQ ID NO: 2228 - protein, 31 aa, Homo sapiens
KHGSNNVGLSENLTDGAAAGNGDGGLVPQRK

SEQ ID NO: 2229 - protein, 20 aa, Homo sapiens
MSVTFISNNTAIQELFRFRC

SEQ ID NO: 2230 - protein, 21 aa, Homo sapiens
KNRVQSKISNLTDAKNPNLRK

SEQ ID NO: 2231 - protein, 17 aa, Homo sapiens
RNRDLNNSSINLTKVKI

SEQ ID NO: 2232 - protein, 14 aa, Homo sapiens
MATRTLNLSFFPRS

SEQ ID NO: 2233 - protein, 35 aa, Homo sapiens
RGTRARLLSSFLSFLNGSSANQAVGQGPEAGEGRG

SEQ ID NO: 2234 - protein, 14 aa, Homo sapiens
RNILDALMLNTTRI

SEQ ID NO: 2235 - protein, 29 aa, Homo sapiens
LTRLQLDGNQITNLTDSSFGGTNLHSLRY

SEQ ID NO: 2236 - protein, 28 aa, Homo sapiens
RELAITDSEHSDAEVSCTDNGTFNLSRG

SEQ ID NO: 2237 - protein, 27 aa, Homo sapiens
KIKLRSAMYLSNTTVTILANLVPFTLT

SEQ ID NO: 2238 - protein, 30 aa, Homo sapiens
RDNLSGLSADMQDYGLIIDGAALSLIMKPR

SEQ ID NO: 2239 - protein, 22 aa, Homo sapiens
KEEEELAYDWSDNNSNISAKRN

SEQ ID NO: 2240 - protein, 34 aa, Homo sapiens
KRYGFYNNSVIIFSSDNGGQTFSGGSNWPLRGRK

SEQ ID NO: 2241 - protein, 18 aa, Homo sapiens
RESWGQESNAGNQTVVRV

SEQ ID NO: 2242 - protein, 20 aa, Homo sapiens
RTTQRIVAPPGGRANITSLG

SEQ ID NO: 2243 - protein, 27 aa, Homo sapiens
RLNTTNAWDAAPPSLGSQPLYRSSLSH

SEQ ID NO: 2244 - protein, 16 aa, Homo sapiens
KSIGPEHNGSMVRNKC

SEQ ID NO: 2245 - protein, 18 aa, Homo sapiens
TLTHATNFLNVMLQSNKS

SEQ ID NO: 2246 - protein, 20 aa, Homo sapiens
MYVDNNRSWFMHCNSHTNRT

SEQ ID NO: 2247 - protein, 14 aa, Homo sapiens
MENGSYTSYFILLG

SEQ ID NO: 2248 - protein, 30 aa, Homo sapiens
KDSESMSFSDLENWAVANSSEPQLEDAKRE

SEQ ID NO: 2249 - protein, 27 aa, Homo sapiens
RVMISAGNLQLPVEAGLVEFTNISQKL

SEQ ID NO: 2250 - protein, 35 aa, Homo sapiens
KSNGLMFTNIMMQNTNPSASPEYMFSSNIEPEPKD

SEQ ID NO: 2251 - protein, 37 aa, Homo sapiens
RGGLGGGYGGASGMGGITTVTVNQSLLSPLNLEVDPH

SEQ ID NO: 2252 - protein, 19 aa, Homo sapiens
KGLYQGFNMSVQGIIIYRA

SEQ ID NO: 2253 - protein, 34 aa, Homo sapiens
KYTEVTDINSVDANYNSSVLVSGDDFGLVKLFKF

SEQ ID NO: 2254 - protein, 21 aa, Homo sapiens
KTPCMPQAASNTSLGLGDLRV

SEQ ID NO: 2255 - protein, 18 aa, Homo sapiens
RGGSGGGGGGGGGGYNRS

SEQ ID NO: 2256 - protein, 19 aa, Homo sapiens
RRGASVNCTTRTNSTPLRA

SEQ ID NO: 2257 - protein, 33 aa, Homo sapiens
MMQESATETISNSSMNQNGMSTLSSQLDAGSRD

SEQ ID NO: 2258 - protein, 28 aa, Homo sapiens
RDGKEPQPSAEAAAAPSLANISCFTQKL

SEQ ID NO: 2259 - protein, 35 aa, Homo sapiens
RYDNVTILFSGIVGFNAFCSKHASGEGAMKIVNLL

SEQ ID NO: 2260 - protein, 23 aa, Homo sapiens
RNYSKSTELPGKNESTIEQIDKK

SEQ ID NO: 2261 - protein, 22 aa, Homo sapiens
RFYKFNTSLAGDLTNLVHGSHC

SEQ ID NO: 2262 - protein, 36 aa, Homo sapiens
AENRNPSCEVHQEPVTYTAIDPGLQDALHQCVNSRC

SEQ ID NO: 2263 - protein, 33 aa, Homo sapiens
RMWRRATVAAGNSVVQVVNVSRLEGDDNPVQLI

SEQ ID NO: 2264 - protein, 21 aa, Homo sapiens
RSMQQQETNLLANLTTNDARD

SEQ ID NO: 2265 - protein, 23 aa, Homo sapiens
RSITNASAAIAPKDNLFIRFLKP

SEQ ID NO: 2266 - protein, 15 aa, Homo sapiens
RCSVGTYNSSGAYRF

SEQ ID NO: 2267 - protein, 15 aa, Homo sapiens
KIMCLDEKIDNFTRQ

SEQ ID NO: 2268 - protein, 18 aa, Homo sapiens
KHVGNQQYNVTYVVKERG

SEQ ID NO: 2269 - protein, 16 aa, Homo sapiens
RVLNASAEAQRAAARF

SEQ ID NO: 2270 - protein, 12 aa, Homo sapiens
RAFSQNANLTKH

SEQ ID NO: 2271 - protein, 22 aa, Homo sapiens
RNLTALGLNLVASGGTAKALRD

SEQ ID NO: 2272 - protein, 13 aa, Homo sapiens
KKHAYCSNLSFRL

SEQ ID NO: 2273 - protein, 20 aa, Homo sapiens
RVLNASTLALALANLNGSRQ

SEQ ID NO: 2274 - protein, 25 aa, Homo sapiens
MNNSQGRVTFEDVTVNFTQGEWQRL

SEQ ID NO: 2275 - protein, 24 aa, Homo sapiens
KVNGTITFIDEIHNDDGVWLRLND

SEQ ID NO: 2276 - protein, 23 aa, Homo sapiens
KCNLCLAMNLQGRHKCIENVSRQ

SEQ ID NO: 2277 - protein, 30 aa, Homo sapiens
KIKRNFSSGTIPGTPGPNGEDGVEQTAIKV

SEQ ID NO: 2278 - protein, 33 aa, Homo sapiens
RHCSVNGTWTGSDPECLVINCGDPGIPANGLRL

SEQ ID NO: 2279 - protein, 29 aa, Homo sapiens
KLLKSIPLDVVLSNNNHTEIQEISLALRS

SEQ ID NO: 2280 - protein, 34 aa, Homo sapiens
PRFSILPMSHEIMPGGNVNITCVAVGSPMPYVKW

SEQ ID NO: 2281 - protein, 27 aa, Homo sapiens
MMQQTPCYSFAPPNTSLNSPSPNYQKY

SEQ ID NO: 2282 - protein, 31 aa, Homo sapiens
RGSQSYYTVAHAISEWVEKQSALLINGTLKH

SEQ ID NO: 2283 - protein, 13 aa, Homo sapiens
LSQFADNTTYAKV

SEQ ID NO: 2284 - protein, 21 aa, Homo sapiens
KFIKNQHCTNISELSNTSEND

SEQ ID NO: 2285 - protein, 24 aa, Homo sapiens
LLEGQDSGNSNGNASINITDISRN

SEQ ID NO: 2286 - protein, 14 aa, Homo sapiens
QNITEEIPMEVFKE

SEQ ID NO: 2287 - protein, 26 aa, Homo sapiens
QGWPRPLTPPAAGGLQNHTVGIIVKT

SEQ ID NO: 2288 - protein, 19 aa, Homo sapiens
RGSSNPLLTTEEANLTEKE

SEQ ID NO: 2289 - protein, 14 aa, Homo sapiens
QALENHTEVQFQKE

SEQ ID NO: 2290 - protein, 31 aa, Homo sapiens
KAVSLSVTVPVSHPVLNLSSPEDLIFEGAKV

SEQ ID NO: 2291 - protein, 22 aa, Homo sapiens
REHMESNLFLSCATNQSPVEKD

SEQ ID NO: 2292 - protein, 15 aa, Homo sapiens
KTQLNSSSLQKLFRE

SEQ ID NO: 2293 - protein, 12 aa, Homo sapiens
RFGYILHTDNRT

SEQ ID NO: 2294 - protein, 22 aa, Homo sapiens
KMLNNNTGIYTCSAQGVWMNKV

SEQ ID NO: 2295 - protein, 37 aa, Homo sapiens
RLEPEGPAPHMLGLVAGWGISNPNVTVDEIISSGTRT

SEQ ID NO: 2296 - protein, 25 aa, Homo sapiens
RELDLPSQDNVSLTSTETPPPLYVG

SEQ ID NO: 2297 - protein, 25 aa, Homo sapiens
RYNATVYSQAANGTEGQPQAIEFRT

SEQ ID NO: 2298 - protein, 20 aa, Homo sapiens
KIHVAGETDSSNLNVSEPRA

SEQ ID NO: 2299 - protein, 31 aa, Homo sapiens
VNLSLIFIIALGSIAGILFVTMIFVAIKCKR

SEQ ID NO: 2300 - protein, 25 aa, Homo sapiens
DDVNVEIVFLHNISPNLELEALFKR

SEQ ID NO: 2301 - protein, 20 aa, Homo sapiens
VMFLFQGNNGTVLYTGDFRL

SEQ ID NO: 2302 - protein, 11 aa, Homo sapiens
RKEGNFSDLKE

SEQ ID NO: 2303 - protein, 33 aa, Homo sapiens
RSYFVVVNHSQSQDTVTTGEALNVIPGAQEKKA

SEQ ID NO: 2304 - protein, 26 aa, Homo sapiens
KQNPMANYSSIPAEIMDHSISPFMRK

SEQ ID NO: 2305 - protein, 25 aa, Homo sapiens
KSEEQPMDLENRSTANVLEETTVKK

SEQ ID NO: 2306 - protein, 15 aa, Homo sapiens
ARDSNVTLAPSGPKG

SEQ ID NO: 2307 - protein, 23 aa, Homo sapiens
REENNISGLNQDITDVCFSPEKD

SEQ ID NO: 2308 - protein, 31 aa, Homo sapiens
RGTSGQPPEGCAAPTVIVSNHNLTDTVQNKQ

SEQ ID NO: 2309 - protein, 13 aa, Homo sapiens
KANQQLNFTEAKE

SEQ ID NO: 2310 - protein, 23 aa, Homo sapiens
IETKVVKEEKANDSNPNEESKKT

SEQ ID NO: 2311 - protein, 17 aa, Homo sapiens
KEMTNEEKNIITNLSKC

SEQ ID NO: 2312 - protein, 15 aa, Homo sapiens
RVFSNVSIILFLNKT

SEQ ID NO: 2313 - protein, 21 aa, Homo sapiens
TATHPPGPAVQLNKTPSSSKK

SEQ ID NO: 2314 - protein, 20 aa, Homo sapiens
KGVHSFYNNISGLTDFGEKV

SEQ ID NO: 2315 - protein, 24 aa, Homo sapiens
RSNKTLADSLDNANDPHDPIVNRL

SEQ ID NO: 2316 - protein, 21 aa, Homo sapiens
TVKGNPSSSVEDHIEYHGHRG

SEQ ID NO: 2317 - protein, 18 aa, Homo sapiens
MIFETTTKNETIAQEDKI

SEQ ID NO: 2318 - protein, 36 aa, Homo sapiens
RRFIPPARMMSTESANSFTLIGEASDGGTMENLSRR

SEQ ID NO: 2319 - protein, 16 aa, Homo sapiens
RLANLTQGEDQYYLRV

SEQ ID NO: 2320 - protein, 24 aa, Homo sapiens
KELPGVCNETMMALWEECKPCLKQ

SEQ ID NO: 2321 - protein, 18 aa, Homo sapiens
REILSVDCSTNNPSQAKL

SEQ ID NO: 2322 - protein, 22 aa, Homo sapiens
KMLNTSSLLEQLNEQFNWVSRL

SEQ ID NO: 2323 - protein, 10 aa, Homo sapiens
RHNSTGCLRM

SEQ ID NO: 2324 - protein, 10 aa, Homo sapiens
KEDALNETRE

SEQ ID NO: 2325 - protein, 22 aa, Homo sapiens
RQLEEFLNQSSPFYFWMNGDRI

SEQ ID NO: 2326 - protein, 28 aa, Homo sapiens
MCYACNKSITAKEALICPTCNVTIHNRC

SEQ ID NO: 2327 - protein, 20 aa, Homo sapiens
KNIGDDGGGDDNTFNFSWKV

SEQ ID NO: 2328 - protein, 28 aa, Homo sapiens
KWFNNSAASLTMPTLDNIPFSLIVSQDV

SEQ ID NO: 2329 - protein, 29 aa, Homo sapiens
KQRMEPLYSLNVSVSDGLFTSTAQVHIRV

SEQ ID NO: 2330 - protein, 27 aa, Homo sapiens
RQHNNTGYIYSRDQWDPEVIENHRKKK

SEQ ID NO: 2331 - protein, 39 aa, Homo sapiens
RTIGIFWLNASETLVEINTEPAVEYTLTQMGPVAAKQKV

SEQ ID NO: 2332 - protein, 31 aa, Homo sapiens
RSASLSSLLITPFPSPNSSLTRSCASSYQRR

SEQ ID NO: 2333 - protein, 31 aa, Homo sapiens
RGPHHLDNSSPGPGSEARGINGGPSRMSPKA

SEQ ID NO: 2334 - protein, 10 aa, Homo sapiens
RDTFVNASRT

SEQ ID NO: 2335 - protein, 21 aa, Homo sapiens
RVLSNNSDANLELINTWVAKN

SEQ ID NO: 2336 - protein, 23 aa, Homo sapiens
KVGQLQLSHNLSLVILVPQNLKH

SEQ ID NO: 2337 - protein, 27 aa, Homo sapiens
KMLFVEPILEVSSLPTTNSTTNSATKI

SEQ ID NO: 2338 - protein, 23 aa, Homo sapiens
RASSNPNATSSSSQDPESLQDRG

SEQ ID NO: 2339 - protein, 28 aa, Homo sapiens
RSIPACVPWSPYLFQPNDTCIVSGWGRE

SEQ ID NO: 2340 - protein, 9 aa, Homo sapiens
KLISNCSKF

SEQ ID NO: 2341 - protein, 26 aa, Homo sapiens
KFSIAILPFSIKAMAEANVSLRRMKK

SEQ ID NO: 2342 - protein, 17 aa, Homo sapiens
RCNTTQGNEVTSILRWA

SEQ ID NO: 2343 - protein, 28 aa, Homo sapiens
KHSKALNTLSSPGQSSFSHGTRNNSAKE

SEQ ID NO: 2344 - protein, 21 aa, Homo sapiens
KKRNRSSSVSSSAASSPERKK

SEQ ID NO: 2345 - protein, 17 aa, Homo sapiens
KANFSIGPMMPVLAGTY

SEQ ID NO: 2346 - protein, 34 aa, Homo sapiens
KARVETQNHWFTYNETMTVESVTQAVSNLALQFG

SEQ ID NO: 2347 - protein, 22 aa, Homo sapiens
KTNRSSVKTPKPVEPAASDLEP

SEQ ID NO: 2348 - protein, 23 aa, Homo sapiens
MRVNNSTMLGASGDYADFQYLKQ

SEQ ID NO: 2349 - protein, 23 aa, Homo sapiens
RLLGHSPVLRNITNSQAPDGRRK

SEQ ID NO: 2350 - protein, 21 aa, Homo sapiens
RNGSDDPSYNGAIIVSGDQKD

SEQ ID NO: 2351 - protein, 27 aa, Homo sapiens
RISWEEYNRTNTRVTHYLPNVTLEYRV

SEQ ID NO: 2352 - protein, 13 aa, Homo sapiens
KLEKNATDNISKL

SEQ ID NO: 2353 - protein, 16 aa, Homo sapiens
RGTANTTTAGVPCQRW

SEQ ID NO: 2354 - protein, 26 aa, Homo sapiens
KGTGNDTVLNVALLNVISNQECNIKH

SEQ ID NO: 2355 - protein, 26 aa, Homo sapiens
RAFHYNVSSHGCQLLPWTQHSPHTRL

SEQ ID NO: 2356 - protein, 22 aa, Homo sapiens
PSLLLFINSSSQDFVVVLLCKN

SEQ ID NO: 2357 - protein, 25 aa, Homo sapiens
RNVNFNGSAGTPVMFNKNGDAPGRY

SEQ ID NO: 2358 - protein, 29 aa, Homo sapiens
KEGLLANTMSKMYGHENGNSSSPSPEEKG

SEQ ID NO: 2359 - protein, 28 aa, Homo sapiens
RSITKNPKIGGLPLIPIQHEGNATLARK

SEQ ID NO: 2360 - protein, 14 aa, Homo sapiens
MLQDIQEVLNRSKS

SEQ ID NO: 2361 - protein, 19 aa, Homo sapiens
KMSATFIGNNTAIQELFKR

SEQ ID NO: 2362 - protein, 19 aa, Homo sapiens
RIRNISNTVMKVKQILGRS

SEQ ID NO: 2363 - protein, 27 aa, Homo sapiens
KICDLLVANNHFAHFFAPQNLTNMNKN

SEQ ID NO: 2364 - protein, 28 aa, Homo sapiens
RANLSSQALQMSLDYGFVTPLTSMSIRG

SEQ ID NO: 2365 - protein, 26 aa, Homo sapiens
KLMPNFSDSFGGGSGAGAGGGGMFGS

SEQ ID NO: 2366 - protein, 28 aa, Homo sapiens
KSQLGFLNVTNYCHLAHELRLSCMERKK

SEQ ID NO: 2367 - protein, 19 aa, Homo sapiens
MFEHFLLHREGMFNDTLRL

SEQ ID NO: 2368 - protein, 25 aa, Homo sapiens
SVTGNPSNSWPSPTEPSSETGNPRH

SEQ ID NO: 2369 - protein, 26 aa, Homo sapiens
LPLNESADITFATLNTKGNEGDIVRD

SEQ ID NO: 2370 - protein, 23 aa, Homo sapiens
RLNTTNAWGAAPPSLGSQPLYRS

SEQ ID NO: 2371 - protein, 36 aa, Homo sapiens
REGELCSLLKENVSELRILSSGNDHGNWCIIAEKKG

SEQ ID NO: 2372 - protein, 24 aa, Homo sapiens
RNTPWTPWLPVNVTQGGARQEQRF

SEQ ID NO: 2373 - protein, 15 aa, Homo sapiens
KEAPYFYNDTVTFKC

SEQ ID NO: 2374 - protein, 16 aa, Homo sapiens
KTPNGNHTGGNIARFS

SEQ ID NO: 2375 - protein, 34 aa, Homo sapiens
YLFVIFDFLIGVLIFATIVGNVGSMISNMNATRA

SEQ ID NO: 2376 - protein, 28 aa, Homo sapiens
RTKDAGLGVYSLALLNNVSYNVVEFSKS

SEQ ID NO: 2377 - protein, 17 aa, Homo sapiens
KVTACHSSQPNATLYKM

SEQ ID NO: 2378 - protein, 21 aa, Homo sapiens
KTLYETEVFSTDFSNISAAKQ

SEQ ID NO: 2379 - protein, 36 aa, Homo sapiens
KTTTVQVPMMHQMEQYYHLVDMELNCTVLQMDYSKN

SEQ ID NO: 2380 - protein, 10 aa, Homo sapiens
KDFVNASSKY

SEQ ID NO: 2381 - protein, 15 aa, Homo sapiens
KNLSMPLLPADFHKE

SEQ ID NO: 2382 - protein, 26 aa, Homo sapiens
RRAELVCLNNTEISENSSDLSQKLKE

SEQ ID NO: 2383 - protein, 17 aa, Homo sapiens
KQVHFFVNASDVDNVKA

SEQ ID NO: 2384 - protein, 35 aa, Homo sapiens
KAHLNVSGIPCSVLLADVEDLIQQQISNDTVSPRA

SEQ ID NO: 2385 - protein, 23 aa, Homo sapiens
RNNQTIFEQTINDLTFDGSFVKE

SEQ ID NO: 2386 - protein, 27 aa, Homo sapiens
RGYLQALASKMTEELEALRNSSLGTRA

SEQ ID NO: 2387 - protein, 34 aa, Homo sapiens
MQAPAFRDKKQGVSAKNQGAHDPDYENITLAFKN

SEQ ID NO: 2388 - protein, 19 aa, Homo sapiens
MFTMATAEHRSNSSIAGKM

SEQ ID NO: 2389 - protein, 33 aa, Homo sapiens
RLPQDGDNVTVENGQLLLLDTNTSILNLLHIKG

SEQ ID NO: 2390 - protein, 17 aa, Homo sapiens
RWQIVPNASSPFGFWSQ

SEQ ID NO: 2391 - protein, 21 aa, Homo sapiens
RETGDNFSDVAIQGGIMGIEI

SEQ ID NO: 2392 - protein, 18 aa, Homo sapiens
MGMIFTLFTINVSTDMRH

SEQ ID NO: 2393 - protein, 26 aa, Homo sapiens
KRLAYLLQQTDEYVANLTELVPQHKA

SEQ ID NO: 2394 - protein, 27 aa, Homo sapiens
MNKWAGLLGPISNHSFGGSFRTASNKE

SEQ ID NO: 2395 - protein, 22 aa, Homo sapiens
KLFSDIENISEETSAEVHPISL

SEQ ID NO: 2396 - protein, 20 aa, Homo sapiens
KLSNNLNVEGGSSENNHSIK

SEQ ID NO: 2397 - protein, 23 aa, Homo sapiens
KSRMAIWAATDHNVDNTTEIFRE

SEQ ID NO: 2398 - protein, 22 aa, Homo sapiens
KVLLLHEVHANDTGSYVCYYKY

SEQ ID NO: 2399 - protein, 24 aa, Homo sapiens
KSVNVSSNLVTQEPSPEETSTKRS

SEQ ID NO: 2400 - protein, 27 aa, Homo sapiens
KAGHSNKYLKMANNTKELEVCEQANKL

SEQ ID NO: 2401 - protein, 28 aa, Homo sapiens
KVLAAKVLNLVLPNLSLGPIDSSVLSRN

SEQ ID NO: 2402 - protein, 24 aa, Homo sapiens
RNYQRIEQNLTSTASSGTNVHGSP

SEQ ID NO: 2403 - protein, 22 aa, Homo sapiens
RVGNLGLATSFFNEKNMNITKD

SEQ ID NO: 2404 - protein, 13 aa, Homo sapiens
IDNTTNSMKKTKS

SEQ ID NO: 2405 - protein, 25 aa, Homo sapiens
SLPMSINVTDDIVYISTHPEASSRT

SEQ ID NO: 2406 - protein, 21 aa, Homo sapiens
KFLTEVEKNATALYHVEAFKT

SEQ ID NO: 2407 - protein, 9 aa, Homo sapiens
RANSTSDEL

SEQ ID NO: 2408 - protein, 25 aa, Homo sapiens
RAGMVYMAGLVFAVGGFNGSLRVRT

SEQ ID NO: 2409 - protein, 24 aa, Homo sapiens
ITNLSPYTNVSVKLILMNPEGRKE

SEQ ID NO: 2410 - protein, 20 aa, Homo sapiens
RDLNVSVTHLIAGEVGSKKY

SEQ ID NO: 2411 - protein, 12 aa, Homo sapiens
RVELEDFNGNRT

SEQ ID NO: 2412 - protein, 21 aa, Homo sapiens
RVINFYAGANQSMNVTCAGKR

SEQ ID NO: 2413 - protein, 22 aa, Homo sapiens
LVSGNNTVPFAVSLVDSTSEKS

SEQ ID NO: 2414 - protein, 34 aa, Homo sapiens
RLEQQMNSASGSSSNGSSINMSGIDNGEGTRLRN

SEQ ID NO: 2415 - protein, 15 aa, Homo sapiens
RFRSSGMTLDNISRA

SEQ ID NO: 2416 - protein, 15 aa, Homo sapiens
KENETESLQILNAKT

SEQ ID NO: 2417 - protein, 14 aa, Homo sapiens
NQLVDALTTWQNKT

SEQ ID NO: 2418 - protein, 27 aa, Homo sapiens
KLPTQNITFQTESSVAEQEAEFQSPKY

SEQ ID NO: 2419 - protein, 18 aa, Homo sapiens
RNQALNLSLAYSFVTPLT

SEQ ID NO: 2420 - protein, 22 aa, Homo sapiens
KAFITNFSMNIDGMTYPGIIKE

SEQ ID NO: 2421 - protein, 17 aa, Homo sapiens
KEYESYSDFERNVTEKM

SEQ ID NO: 2422 - protein, 20 aa, Homo sapiens
KSNISPNFNFMGQLLDFERS

SEQ ID NO: 2423 - protein, 25 aa, Homo sapiens
MNMGSDFDVFAHITNNTAEEYVCRL

SEQ ID NO: 2424 - protein, 35 aa, Homo sapiens
KLDDISSNYTESFSTLDENDLLNPSEDIIAVQLKF

SEQ ID NO: 2425 - protein, 28 aa, Homo sapiens
KQKPSGLTRSTSMLISSGHNKSSNSLKL

SEQ ID NO: 2426 - protein, 18 aa, Homo sapiens
KKEWNDSTSVQNPTRLRE

SEQ ID NO: 2427 - protein, 20 aa, Homo sapiens
RSQANGAGALSYVSPNTSKC

SEQ ID NO: 2428 - protein, 18 aa, Homo sapiens
RHDYILLPEDALTNTTRL

SEQ ID NO: 2429 - protein, 21 aa, Homo sapiens
RAPSNVSTIIHILYLPEDAKG

SEQ ID NO: 2430 - protein, 25 aa, Homo sapiens
MPPVSLNHNLTTPFTSQAGENSLFM

SEQ ID NO: 2431 - protein, 22 aa, Homo sapiens
RTKSNSLSEQLAINTSPDAVKA

SEQ ID NO: 2432 - protein, 21 aa, Homo sapiens
MVNNVTPARAVVSLINGGQRY

SEQ ID NO: 2433 - protein, 19 aa, Homo sapiens
MQKAFNSSSFNSNTFLTRL

SEQ ID NO: 2434 - protein, 24 aa, Homo sapiens
KKRGTFIEFRNGMLNISPIGRSCT

SEQ ID NO: 2435 - protein, 16 aa, Homo sapiens
MQQHNMSWIEVQFLKK

SEQ ID NO: 2436 - protein, 23 aa, Homo sapiens
MVTEMYSGPCVAMEIQQNNATKT

SEQ ID NO: 2437 - protein, 20 aa, Homo sapiens
RVSGLMMANHTSISSLFERT

SEQ ID NO: 2438 - protein, 31 aa, Homo sapiens
KGGAVAADGRIEPGDMLLQVNEINFENMSND

SEQ ID NO: 2439 - protein, 10 aa, Homo sapiens
KAYSWNISRK

SEQ ID NO: 2440 - protein, 20 aa, Homo sapiens
MDQNQHLNKTAEAQPSENKK

SEQ ID NO: 2441 - protein, 22 aa, Homo sapiens
RVVNLEALQMLSVNTTLEELKI

SEQ ID NO: 2442 - protein, 27 aa, Homo sapiens
RNDSESSGVLYSRAPTYFCGQTLTFRQ

SEQ ID NO: 2443 - protein, 17 aa, Homo sapiens
KDDNLEHYKNSTVMARA

SEQ ID NO: 2444 - protein, 22 aa, Homo sapiens
HLRQMGVTEWSVNGSPIDTLRE

SEQ ID NO: 2445 - protein, 20 aa, Homo sapiens
KMMNDSILRLQTWDEAVFRE

SEQ ID NO: 2446 - protein, 36 aa, Homo sapiens
KSLKHQNILLEVDDFENRNGTDGLSYNGAIIVSGKQ

SEQ ID NO: 2447 - protein, 24 aa, Homo sapiens
MKNKRNVTEFVLTGLTQNPKMEKV

SEQ ID NO: 2448 - protein, 29 aa, Homo sapiens
KMADALLFGNFGVQNITAAIQLYESLAKE

SEQ ID NO: 2449 - protein, 28 aa, Homo sapiens
MTLSITSGMPNNFSEMPQQSTTLNLWRE

SEQ ID NO: 2450 - protein, 19 aa, Homo sapiens
PGNLPPSMNLSQLLGLRKN

SEQ ID NO: 2451 - protein, 25 aa, Homo sapiens
RINKLMNESLMLVTALNPHIGYDKA

SEQ ID NO: 2452 - protein, 17 aa, Homo sapiens
KNISNPEAYDHCFEKKE

SEQ ID NO: 2453 - protein, 27 aa, Homo sapiens
GEDTDLDGWPNENLVCVANATYHCKKD

SEQ ID NO: 2454 - protein, 15 aa, Homo sapiens
KVVNSTTGPGEHLRN

SEQ ID NO: 2455 - protein, 23 aa, Homo sapiens
KVSCPIMPCSNATVPDGECCPRC

SEQ ID NO: 2456 - protein, 36 aa, Homo sapiens
KGCSSSTSVLLTLDNNVVNGSSPAIRTNYIGHKTKD

SEQ ID NO: 2457 - protein, 18 aa, Homo sapiens
KFIHNENGANYSVTATRS

SEQ ID NO: 2458 - protein, 32 aa, Homo sapiens
NLLPICLPDNDTFYDLGLMGYVSGFGVMEEKI

SEQ ID NO: 2459 - protein, 26 aa, Homo sapiens
KEHEAQSNASLDVFLGHTNVEELMKL

SEQ ID NO: 2460 - protein, 23 aa, Homo sapiens
KMLLTFHTDFSNEENGTIMFYKG

SEQ ID NO: 2461 - protein, 8 aa, Homo sapiens
RCNYSIRV

SEQ ID NO: 2462 - protein, 26 aa, Homo sapiens
KMVSHHNLTTGATLINEQWLLTTAKN

SEQ ID NO: 2463 - protein, 15 aa, Homo sapiens
KNLFLNHSENATAKD

SEQ ID NO: 2464 - protein, 22 aa, Homo sapiens
RDKYLHTNCLAALANMSAQFRS

SEQ ID NO: 2465 - protein, 22 aa, Homo sapiens
LLLLLVLANLTDASDAPNPYRQ

SEQ ID NO: 2466 - protein, 18 aa, Homo sapiens
KLAAKCLVMKAEMNGSKL

SEQ ID NO: 2467 - protein, 31 aa, Homo sapiens
RYMLASPDVTSILLTYNLSNTNSCNVSPKKE

SEQ ID NO: 2468 - protein, 26 aa, Homo sapiens
QCSSLGAESILSGKENSSALSPNHRI

SEQ ID NO: 2469 - protein, 31 aa, Homo sapiens
RSPLQACENLAMNEGGPPTENNSLILEENKI

SEQ ID NO: 2470 - protein, 27 aa, Homo sapiens
RLRNSSSFSMDDPDAGAMGAAAAEGQA

SEQ ID NO: 2471 - protein, 25 aa, Homo sapiens
RTTSTLSLSAEDSQSTESNMSVPKK

SEQ ID NO: 2472 - protein, 19 aa, Homo sapiens
KENNLTEDNPNLSMAQRRH

SEQ ID NO: 2473 - protein, 21 aa, Homo sapiens
MVDPEMLPPKTARQTENVSRT

SEQ ID NO: 2474 - protein, 19 aa, Homo sapiens
KCIRCAVVGNGGILNGSRQ

SEQ ID NO: 2475 - protein, 23 aa, Homo sapiens
KKNSDGMEAAGVQIQMVNESLGY

SEQ ID NO: 2476 - protein, 31 aa, Homo sapiens
RNCQDIDECVTGIHNCSINETCFNIQGGFRC

SEQ ID NO: 2477 - protein, 19 aa, Homo sapiens
RCATPHGDNASLEATFVKR

SEQ ID NO: 2478 - protein, 34 aa, Homo sapiens
RSPASERRPLGNFTAPPTYTETLSTAPLASWVRS

SEQ ID NO: 2479 - protein, 28 aa, Homo sapiens
KDPPSEANSIQSANATTKTSETNHTSRP

SEQ ID NO: 2480 - protein, 9 aa, Homo sapiens
RNYTLTGRD

SEQ ID NO: 2481 - protein, 20 aa, Homo sapiens
KINNDFNYEFYNSTWSYVKH

SEQ ID NO: 2482 - protein, 18 aa, Homo sapiens
KERVENYSNVSIHLKNPE

SEQ ID NO: 2483 - protein, 29 aa, Homo sapiens
KSSSTPFPFRTGLTSGNVTENLQTYIDKS

SEQ ID NO: 2484 - protein, 19 aa, Homo sapiens
RKTENAYNAIINGEANVTG

SEQ ID NO: 2485 - protein, 30 aa, Homo sapiens
KEIRVLEFRSPKENDSGVDVYYAVTFNGEA

SEQ ID NO: 2486 - protein, 11 aa, Homo sapiens
KATNATLDPRS

SEQ ID NO: 2487 - protein, 36 aa, Homo sapiens
MVSFVSNYSHTANILPDIENEDFIKDCVRIHNKFRS

SEQ ID NO: 2488 - protein, 18 aa, Homo sapiens
MHLTTLCNTSLDNPTQRN

SEQ ID NO: 2489 - protein, 37 aa, Homo sapiens
KDISSSEMTNPSDTLNIETLLNGSVKRVSENNGNGKN

SEQ ID NO: 2490 - protein, 20 aa, Homo sapiens
NPPHNLSVINSEELSSILKL

SEQ ID NO: 2491 - protein, 13 aa, Homo sapiens
RETHLETNFTLKS

SEQ ID NO: 2492 - protein, 22 aa, Homo sapiens
KAGKPVVAAPGAGNLTKFEPRA

SEQ ID NO: 2493 - protein, 15 aa, Homo sapiens
HSDHDNSTSLNGGKR

SEQ ID NO: 2494 - protein, 31 aa, Homo sapiens
RVLNTSSLESATDEAGSPLAAAAAAAAAERC

SEQ ID NO: 2495 - protein, 23 aa, Homo sapiens
RLFPNASQHITPSYNYAPNPDKH

SEQ ID NO: 2496 - protein, 28 aa, Homo sapiens
TRGRSISFPALLPIPGSNRSSVIMTAKP

SEQ ID NO: 2497 - protein, 25 aa, Homo sapiens
RALLSITDNSSSSDIVESSTSYIKI

SEQ ID NO: 2498 - protein, 23 aa, Homo sapiens
KSHAASDAPENLTLLAETADARG

SEQ ID NO: 2499 - protein, 22 aa, Homo sapiens
RSYSESSSTSSSESLNSSAPRG

SEQ ID NO: 2500 - protein, 16 aa, Homo sapiens
RSNISSYDGEYAQPST

SEQ ID NO: 2501 - protein, 16 aa, Homo sapiens
KNWIALIPKGNCTYRD

SEQ ID NO: 2502 - protein, 17 aa, Homo sapiens
KKMLYRDFNMTGWAYKT

SEQ ID NO: 2503 - protein, 30 aa, Homo sapiens
KEEVQNLTSVLNELQEEIGAYDYDELQSRV

SEQ ID NO: 2504 - protein, 23 aa, Homo sapiens
RLPHPWSGTGQVVYNGSIYFNKF

SEQ ID NO: 2505 - protein, 15 aa, Homo sapiens
KVQNMSQSIEVLDRR

SEQ ID NO: 2506 - protein, 17 aa, Homo sapiens
KSMVDFMNTDNFTSHRL

SEQ ID NO: 2507 - protein, 13 aa, Homo sapiens
KSDNNYSTPNERG

SEQ ID NO: 2508 - protein, 16 aa, Homo sapiens
AMAYDLLPIENDTYKQ

SEQ ID NO: 2509 - protein, 19 aa, Homo sapiens
KENMNLSEAQVQALALSRQ

SEQ ID NO: 2510 - protein, 24 aa, Homo sapiens
RRSSENMTAEPMSESKLNTLVQKL

SEQ ID NO: 2511 - protein, 17 aa, Homo sapiens
RLMSTEASQNITYHCKN

SEQ ID NO: 2512 - protein, 13 aa, Homo sapiens
RNLSEGNNANYTE

SEQ ID NO: 2513 - protein, 26 aa, Homo sapiens
KDRGVTRFQENASEGKAPAEDVFKKP

SEQ ID NO: 2514 - protein, 17 aa, Homo sapiens
MNVSGGPITREASKEIP

SEQ ID NO: 2515 - protein, 16 aa, Homo sapiens
KTPSVSPNITQLFQKQ

SEQ ID NO: 2516 - protein, 20 aa, Homo sapiens
MNYSVSAGLVVGIFIGFQKK

SEQ ID NO: 2517 - protein, 14 aa, Homo sapiens
MQELSNILNLSYKQ

SEQ ID NO: 2518 - protein, 29 aa, Homo sapiens
RTHHILIDLRHRPTAGAFNHSDLDAELRR

SEQ ID NO: 2519 - protein, 28 aa, Homo sapiens
RISCRPQTQISNNYGNNPLNSSLLPQKQ

SEQ ID NO: 2520 - protein, 28 aa, Homo sapiens
REIVSQTTATQEKSQEELPTTNNSVSKE

SEQ ID NO: 2521 - protein, 22 aa, Homo sapiens
KISLKIQNCRNVTSLPCLSLRK

SEQ ID NO: 2522 - protein, 18 aa, Homo sapiens
RAPTFLMNQTDTHIVEKM

SEQ ID NO: 2523 - protein, 25 aa, Homo sapiens
KDTNVQVLMVLGAGRGPLVNASLRA

SEQ ID NO: 2524 - protein, 23 aa, Homo sapiens
MEGTATCNGSGSDTCAQCAHFRD

SEQ ID NO: 2525 - protein, 27 aa, Homo sapiens
RSLIASGLYGYNATLVGVLMAVFSDKG

SEQ ID NO: 2526 - protein, 24 aa, Homo sapiens
KKNPMVETLGTVLQLKQPLNTTRI

SEQ ID NO: 2527 - protein, 25 aa, Homo sapiens
KMAAVTLLALAYTQGPVLFNLTFKI

SEQ ID NO: 2528 - protein, 21 aa, Homo sapiens
RGTAGNALMDGASQLMGENRT

SEQ ID NO: 2529 - protein, 31 aa, Homo sapiens
RDVMLENYSNLVSLGLLGPKPDTFSQLEKRE

SEQ ID NO: 2530 - protein, 25 aa, Homo sapiens
EENTDDNITVQGEIRKEDGMENLKN

SEQ ID NO: 2531 - protein, 31 aa, Homo sapiens
RDTAVFECLPQHAMFGNDTITCTTHGNWTKL

SEQ ID NO: 2532 - protein, 15 aa, Homo sapiens
RVYKPSAGNNSLYRD

SEQ ID NO: 2533 - protein, 13 aa, Homo sapiens
KLGNWSAMPSCKA

SEQ ID NO: 2534 - protein, 10 aa, Homo sapiens
KLCDNLSTKN

SEQ ID NO: 2535 - protein, 32 aa, Homo sapiens
RTAGWNVPIGTLRPFLNWTGPPEPIEAAVARF

SEQ ID NO: 2536 - protein, 18 aa, Homo sapiens
KNLNYSVPEEQGAGTVIG

SEQ ID NO: 2537 - protein, 22 aa, Homo sapiens
KKQSNNDLFQVNSTSDDEIPRK

SEQ ID NO: 2538 - protein, 20 aa, Homo sapiens
MASQLQEKCIAFIVDNFSKI

SEQ ID NO: 2539 - protein, 18 aa, Homo sapiens
KSIHEQDTNVNNSVLKKV

SEQ ID NO: 2540 - protein, 20 aa, Homo sapiens
KTGGDNKTLLHLGSSAPGKE

SEQ ID NO: 2541 - protein, 29 aa, Homo sapiens
RNISDGFDGIPDNVDAALALPAHSYSGRE

SEQ ID NO: 2542 - protein, 25 aa, Homo sapiens
KNNATVHEQVGGPSLTSDLQAQSKG

SEQ ID NO: 2543 - protein, 10 aa, Homo sapiens
KNGSLFAFRG

SEQ ID NO: 2544 - protein, 20 aa, Homo sapiens
NTSAPPAVSPNITVLAPGKG

SEQ ID NO: 2545 - protein, 16 aa, Homo sapiens
RAATAPLLEAVDNLSA

SEQ ID NO: 2546 - protein, 25 aa, Homo sapiens
RVTWKPQGAPVEWEEETVTNHTLRV

SEQ ID NO: 2547 - protein, 16 aa, Homo sapiens
RRYHIYENGTLQINRT

SEQ ID NO: 2548 - protein, 22 aa, Homo sapiens
MITMVCCAHSTNEPSNMSYVKE

SEQ ID NO: 2549 - protein, 21 aa, Homo sapiens
RVEDEGNYTCLFVTFPQGSRS

SEQ ID NO: 2550 - protein, 20 aa, Homo sapiens
FGSNMGNGTVFLGIPGDNKQ

SEQ ID NO: 2551 - protein, 24 aa, Homo sapiens
RIRVDLPLGSPAVNCTVLPGGISV

SEQ ID NO: 2552 - protein, 29 aa, Homo sapiens
VLNKNGMVEFSVTSNETITVSPEYVGSRL

SEQ ID NO: 2553 - protein, 21 aa, Homo sapiens
RSVNGTTSDCLVSLVTSVTNV

SEQ ID NO: 2554 - protein, 22 aa, Homo sapiens
RSTERNVSVEALASALQLLARE

SEQ ID NO: 2555 - protein, 17 aa, Homo sapiens
RQGGVNATQVLIQHLRG

SEQ ID NO: 2556 - protein, 17 aa, Homo sapiens
KDANISQPETTKEGLRA

SEQ ID NO: 2557 - protein, 19 aa, Homo sapiens
KLGTSLSSGHVLMNGTLKQ

SEQ ID NO: 2558 - protein, 13 aa, Homo sapiens
KLNVEAANWTVRG

SEQ ID NO: 2559 - protein, 24 aa, Homo sapiens
KFHDVSESTHWTPFLNASVHYIRE

SEQ ID NO: 2560 - protein, 14 aa, Homo sapiens
RNLTTSLTESVDRN

SEQ ID NO: 2561 - protein, 9 aa, Homo sapiens
RNINYTERG

SEQ ID NO: 2562 - protein, 17 aa, Homo sapiens
RTLLLVGSPTWKNASRL

SEQ ID NO: 2563 - protein, 32 aa, Homo sapiens
KDLQRSLPPVMAQNLSIPLAFACLLHLANEKN

SEQ ID NO: 2564 - protein, 18 aa, Homo sapiens
RYMLMLSFNNSLDVAAHL

SEQ ID NO: 2565 - protein, 12 aa, Homo sapiens
KQVPLIPDLNQT

SEQ ID NO: 2566 - protein, 16 aa, Homo sapiens
KLRIFYQFLYNNNTRQ

SEQ ID NO: 2567 - protein, 12 aa, Homo sapiens
KSYNVTSVLFRK

SEQ ID NO: 2568 - protein, 19 aa, Homo sapiens
KRGPECSQNYTTPSGVIKS

SEQ ID NO: 2569 - protein, 21 aa, Homo sapiens
KEGFSANYSVLQSSVSEDFKC

SEQ ID NO: 2570 - protein, 26 aa, Homo sapiens
KTSATSVNLSLLTADLYSLFCGLFLF

SEQ ID NO: 2571 - protein, 13 aa, Homo sapiens
KFVLNSNITNIPQ

SEQ ID NO: 2572 - protein, 29 aa, Homo sapiens
RVQALDPDEGSNGEVQYSLSNSTQAELRH

SEQ ID NO: 2573 - protein, 35 aa, Homo sapiens
  VARIANT (1)...(35): Xaa = Any Amino Acid
RVSTVYANNGSVLQGTSVASVYHGKILIGTVFXKT

SEQ ID NO: 2574 - protein, 26 aa, Homo sapiens
KNASDGALMDDNQNEWGDEDLETKKF

SEQ ID NO: 2575 - protein, 24 aa, Homo sapiens
KLLMENPYEGPDSQKEKDSNSSKY

SEQ ID NO: 2576 - protein, 36 aa, Homo sapiens
KKVLVAPPPDEEANATSAVVSLLNETVTEVPEETKM

SEQ ID NO: 2577 - protein, 16 aa, Homo sapiens
KNNKSDTLPLATRYNV

SEQ ID NO: 2578 - protein, 21 aa, Homo sapiens
RGNLNFTCNGNSVISPVGNRV

SEQ ID NO: 2579 - protein, 23 aa, Homo sapiens
KRFEISCNLSLDAMEEFLNRRKM

SEQ ID NO: 2580 - protein, 27 aa, Homo sapiens
PSSEVMNKSRCESLLFNESMLWENAKM

SEQ ID NO: 2581 - protein, 14 aa, Homo sapiens
KELQEGNETDEAKT

SEQ ID NO: 2582 - protein, 17 aa, Homo sapiens
KLALRNNSASTTQHLRL

SEQ ID NO: 2583 - protein, 26 aa, Homo sapiens
SAMINSNDDNGVLAGNWSGTYTGGRD

SEQ ID NO: 2584 - protein, 14 aa, Homo sapiens
GPTQCVNCSQFLRG

SEQ ID NO: 2585 - protein, 23 aa, Homo sapiens
MKFRNSSVAMGASLSCSEYSLKV

SEQ ID NO: 2586 - protein, 11 aa, Homo sapiens
KLANNGTVLRA

SEQ ID NO: 2587 - protein, 17 aa, Homo sapiens
RQFPKLNISEVDEQVRL

SEQ ID NO: 2588 - protein, 29 aa, Homo sapiens
KEDGSGSAYDKESMAIIKLNNTTVLYLKE

SEQ ID NO: 2589 - protein, 22 aa, Homo sapiens
KVPLSHSRSNDTLYIPEWEGRA

SEQ ID NO: 2590 - protein, 19 aa, Homo sapiens
RKRNVDSSGNKSVLMERLK

SEQ ID NO: 2591 - protein, 19 aa, Homo sapiens
MINFSAFLGAATMYTRYKI

SEQ ID NO: 2592 - protein, 26 aa, Homo sapiens
RRLLIKKMPAAATIPANSSDAPFIRP

SEQ ID NO: 2593 - protein, 21 aa, Homo sapiens
KQLLRDLSGLQGMNGSIQAKS

SEQ ID NO: 2594 - protein, 20 aa, Homo sapiens
KKKDSLHGSTGAVNATRPTL

SEQ ID NO: 2595 - protein, 23 aa, Homo sapiens
KDLNGNVFQDAVFNQTVTVIERE

SEQ ID NO: 2596 - protein, 23 aa, Homo sapiens
KHSSGTSNTSTANRSTHNELEKN

SEQ ID NO: 2597 - protein, 23 aa, Homo sapiens
MGRVLLQNTSFFSSLLNEMAHKF

SEQ ID NO: 2598 - protein, 20 aa, Homo sapiens
KSLPNFPNTSATANATGGRA

SEQ ID NO: 2599 - protein, 28 aa, Homo sapiens
REHYNLSAATCSPGQMCGHYTQVVWAKT

SEQ ID NO: 2600 - protein, 24 aa, Homo sapiens
MPNNLTDCEDGDGGANPGDGNPKE

SEQ ID NO: 2601 - protein, 35 aa, Homo sapiens
KNMALFEEEMDTSPMVSSLLSGLANYTNLPQGSRE

SEQ ID NO: 2602 - protein, 27 aa, Homo sapiens
KQPTPIANTSSQQAVFTSARQLPSART

SEQ ID NO: 2603 - protein, 33 aa, Homo sapiens
KDQVNGTSEDSADGSTVGTAVSSSDDADLPPPP

SEQ ID NO: 2604 - protein, 31 aa, Homo sapiens
RCGEPPSIMNGYASGSNYSFGAMVAYSCNKG

SEQ ID NO: 2605 - protein, 11 aa, Homo sapiens
KHPLTANASRS

SEQ ID NO: 2606 - protein, 18 aa, Homo sapiens
KLLYLTTTNESGVFITGH

SEQ ID NO: 2607 - protein, 17 aa, Homo sapiens
MSSKHNMSGGEFQGKRE

SEQ ID NO: 2608 - protein, 28 aa, Homo sapiens
MSGTTTSTNTFPGGPIATLFNMSMSIKD

SEQ ID NO: 2609 - protein, 43 aa, Homo sapiens
RKMAHPAMFPRRGSGSGSASALNAAGTGVGSNATSSEDFPPPS

SEQ ID NO: 2610 - protein, 12 aa, Homo sapiens
AAQNNTVTVPKN

SEQ ID NO: 2611 - protein, 18 aa, Homo sapiens
RISKLINSSDELQDNFRE

SEQ ID NO: 2612 - protein, 21 aa, Homo sapiens
RDVMLENYSHLVSVGYLVAKP

SEQ ID NO: 2613 - protein, 25 aa, Homo sapiens
REVNSTDWDSKMGFWAPLVLSHSRR

SEQ ID NO: 2614 - protein, 28 aa, Homo sapiens
MENFSLLSISGPPISSSALSAFPDIMFS

SEQ ID NO: 2615 - protein, 20 aa, Homo sapiens
KRQAEEAEEQSNANLSKFRK

SEQ ID NO: 2616 - protein, 27 aa, Homo sapiens
MNIMSTLQWAVNSSIDVDSLMRSVSRV

SEQ ID NO: 2617 - protein, 25 aa, Homo sapiens
PAAEHFNYSVMVDIRELIEVDDVME

SEQ ID NO: 2618 - protein, 16 aa, Homo sapiens
RDGQLLPSSNYSNIKI

SEQ ID NO: 2619 - protein, 26 aa, Homo sapiens
KSFGSPPLAVSNVSAAVMVLMAPRGR

SEQ ID NO: 2620 - protein, 20 aa, Homo sapiens
KNDSLIQNDSILESLLEVLR

SEQ ID NO: 2621 - protein, 23 aa, Homo sapiens
KEECRLLNAPPVPPRGGNGSGRL

SEQ ID NO: 2622 - protein, 21 aa, Homo sapiens
GLNTTGVPASLPVEFTIDAKD

SEQ ID NO: 2623 - protein, 30 aa, Homo sapiens
RIDRMFPEMSIHLSRPNGTSAMLLVTLGKV

SEQ ID NO: 2624 - protein, 13 aa, Homo sapiens
KKLSNFSFLTHRQ

SEQ ID NO: 2625 - protein, 28 aa, Homo sapiens
RTSEHQVDLKVDPSQPSNVSHKLWTAAG

SEQ ID NO: 2626 - protein, 11 aa, Homo sapiens
RNASLSQSPRV

SEQ ID NO: 2627 - protein, 19 aa, Homo sapiens
KWTNLSDPMPVGQMGTVKY

SEQ ID NO: 2628 - protein, 22 aa, Homo sapiens
RERTSSSIVFEDSGCDNASSKE

SEQ ID NO: 2629 - protein, 23 aa, Homo sapiens
KFLAEHPNVTLTISAARLYYYRD

SEQ ID NO: 2630 - protein, 33 aa, Homo sapiens
KLELNPHTVENVTKNEDSMTGIEVEKWTQNKKS

SEQ ID NO: 2631 - protein, 32 aa, Homo sapiens
RFLLNDNLTLPPEMYVYSTNSDHLPMTSSFRK

SEQ ID NO: 2632 - protein, 15 aa, Homo sapiens
KSEENSTVFSHLMKY

SEQ ID NO: 2633 - protein, 24 aa, Homo sapiens
MILNLTQSSGFNGFTPLVTLLLRH

SEQ ID NO: 2634 - protein, 23 aa, Homo sapiens
KGIAILNTSVAPMLNPFIYTLRN

SEQ ID NO: 2635 - protein, 26 aa, Homo sapiens
RAKWDTANNPLYKEATSTFTNITYRG

SEQ ID NO: 2636 - protein, 13 aa, Homo sapiens
KNVTLILDCKKKT

SEQ ID NO: 2637 - protein, 20 aa, Homo sapiens
KAGNETQISEFLLLGFSEKQ

SEQ ID NO: 2638 - protein, 25 aa, Homo sapiens
KYRTKIETLNFTPVDDRVDYVTAKQ

SEQ ID NO: 2639 - protein, 25 aa, Homo sapiens
MPDTPDILLAKSNSANISQKLYTKG

SEQ ID NO: 2640 - protein, 27 aa, Homo sapiens
MVLASGNSSSHPVSFILLGIPGLESFQ

SEQ ID NO: 2641 - protein, 26 aa, Homo sapiens
KAIELLMETAEVEQNGGLFIMNGSRR

SEQ ID NO: 2642 - protein, 25 aa, Homo sapiens
MNLDSFFSFLLKSLIMALSNSSWRL

SEQ ID NO: 2643 - protein, 13 aa, Homo sapiens
RNLSTCFSSGDLF

SEQ ID NO: 2644 - protein, 9 aa, Homo sapiens
NVGQNTTRF

SEQ ID NO: 2645 - protein, 22 aa, Homo sapiens
MTVRNIASICNMGTNASALEKD

SEQ ID NO: 2646 - protein, 25 aa, Homo sapiens
MDTTISINNTVITPMLNPIIYSLRN

SEQ ID NO: 2647 - protein, 21 aa, Homo sapiens
MTTENPNQTVVSHFFLEGLRY

SEQ ID NO: 2648 - protein, 30 aa, Homo sapiens
KEDSGKIKLLLHWMPEDILPDVWVNESERH

SEQ ID NO: 2649 - protein, 32 aa, Homo sapiens
MIILAGINFTYSLTVIIISYLFILIAILRMRS

SEQ ID NO: 2650 - protein, 18 aa, Homo sapiens
RRNCTLVTEFILLGLTSR

SEQ ID NO: 2651 - protein, 36 aa, Homo sapiens
RVKKMAMFVVAGFNLSSSLFIILLSYLFIFAAIFRI

SEQ ID NO: 2652 - protein, 27 aa, Homo sapiens
KHPMANITWMANHTGWSDFILLGLFRQ

SEQ ID NO: 2653 - protein, 45 aa, Homo sapiens
KKQPGQPRPTSKPPASGAAANVSTSGITPGQAAAIASTTIMVPFG

SEQ ID NO: 2654 - protein, 36 aa, Homo sapiens
KCSENATMTLPGIHPPTLNQIMDWICLLLDANFTVV

SEQ ID NO: 2655 - protein, 30 aa, Homo sapiens
RLNYLLRVNGSEQTVVAFFIMPARTNNFNV

SEQ ID NO: 2656 - protein, 14 aa, Homo sapiens
MNNTAASPMSTATS

SEQ ID NO: 2657 - protein, 22 aa, Homo sapiens
KLTDTICGVGNMSANASDQERT

SEQ ID NO: 2658 - protein, 16 aa, Homo sapiens
KQSVPAHFVALNGSKL

SEQ ID NO: 2659 - protein, 23 aa, Homo sapiens
RLGSYPVGGNVSFECEDGFILRG

SEQ ID NO: 2660 - protein, 12 aa, Homo sapiens
KTMFPNLTDVRE

SEQ ID NO: 2661 - protein, 28 aa, Homo sapiens
KDHENGTGTNTYAALNSVYLMMNNQMRL

SEQ ID NO: 2662 - protein, 25 aa, Homo sapiens
KRFNGSESIKSSWNISVVKFLLEKL

SEQ ID NO: 2663 - protein, 22 aa, Homo sapiens
MNISGSSCGSPNSADTSSDFKD

SEQ ID NO: 2664 - protein, 22 aa, Homo sapiens
SSNKQILINKNISESLGEQNRT

SEQ ID NO: 2665 - protein, 28 aa, Homo sapiens
RVHLTPVEGVPDSDYINASFINGYQEKN

SEQ ID NO: 2666 - protein, 20 aa, Homo sapiens
RNKESSDQTGINISGFENKI

SEQ ID NO: 2667 - protein, 30 aa, Homo sapiens
KCESDNTTNGCGLESPGNTVTPVNVNEVKP

SEQ ID NO: 2668 - protein, 29 aa, Homo sapiens
KSSLSASTNPELGSNVSGTQTYPVVTGRD

SEQ ID NO: 2669 - protein, 15 aa, Homo sapiens
RTHGRNGTENINHRG

SEQ ID NO: 2670 - protein, 27 aa, Homo sapiens
RRHNSSDGFDSAIGRPNGGNFGRKEKN

SEQ ID NO: 2671 - protein, 26 aa, Homo sapiens
KEVNSCTTGSSNSTIIGSQGSETPKE

SEQ ID NO: 2672 - protein, 21 aa, Homo sapiens
RKLLFLSPDLELNSSSSHNTL

SEQ ID NO: 2673 - protein, 36 aa, Homo sapiens
RNSTDENFHASLMSEISPISTSPEISEASLMSNLPL

SEQ ID NO: 2674 - protein, 24 aa, Homo sapiens
KFHHLIPAHTFTNISTKNPQGSKS

SEQ ID NO: 2675 - protein, 26 aa, Homo sapiens
RTPMNSSWLPGSPMPQAQSPEEGQRP

SEQ ID NO: 2676 - protein, 32 aa, Homo sapiens
HRVLHNSLGNISMLPCSSFTPNWPVQNPDSRK

SEQ ID NO: 2677 - protein, 25 aa, Homo sapiens
KIMNLTEFSMVDGMWQAQGYPRNRL

SEQ ID NO: 2678 - protein, 25 aa, Homo sapiens
RRHKDMDVDILALVNDTVGTMMTCA

SEQ ID NO: 2679 - protein, 19 aa, Homo sapiens
RQLNTSDENGKEELFSLKD

SEQ ID NO: 2680 - protein, 24 aa, Homo sapiens
KNFINQGPYENRSMFESLDLSWKL

SEQ ID NO: 2681 - protein, 30 aa, Homo sapiens
KHVTMDQVGTFAGLLIGLAQLNCSELKLKR

SEQ ID NO: 2682 - protein, 20 aa, Homo sapiens
VKEMHTCTVEGCNATFPSRR

SEQ ID NO: 2683 - protein, 29 aa, Homo sapiens
KHSGGGGGGGGGGGADPAWTSALSGNSSG

SEQ ID NO: 2684 - protein, 14 aa, Homo sapiens
MILSNTTAVTPFLT

SEQ ID NO: 2685 - protein, 30 aa, Homo sapiens
PSSLIQANVTVGTCSGFCSQKEFPLAILRG

SEQ ID NO: 2686 - protein, 23 aa, Homo sapiens
RSLVPTLREMVAFLNVSVSEERL

SEQ ID NO: 2687 - protein, 26 aa, Homo sapiens
KTGEDEDEEDNDALLKENESPDVRRD

SEQ ID NO: 2688 - protein, 20 aa, Homo sapiens
KTIAQGNLSNTDVQAAKNKL

SEQ ID NO: 2689 - protein, 27 aa, Homo sapiens
MLENPLNSTQWMNDPETGPVMLQISRI

SEQ ID NO: 2690 - protein, 34 aa, Homo sapiens
KADTHDEILEGLNFNLTEIPEAQIHEGFQELLRT

SEQ ID NO: 2691 - protein, 32 aa, Homo sapiens
RQLAHQSNSTNIFFSPVSIATAFAMLSLGTKA

SEQ ID NO: 2692 - protein, 18 aa, Homo sapiens
KYLGNATAIFFLPDEGKL

SEQ ID NO: 2693 - protein, 21 aa, Homo sapiens
KVVNNSPQPQNVVFDVQIPKG

SEQ ID NO: 2694 - protein, 16 aa, Homo sapiens
KGAFISNFSMTVDGKT

SEQ ID NO: 2695 - protein, 26 aa, Homo sapiens
KENIQDNISLFSLGMGFDVDYDFLKR

SEQ ID NO: 2696 - protein, 27 aa, Homo sapiens
RVISAMVNSLDDNGVLIGNWSGDYSRG

SEQ ID NO: 2697 - protein, 19 aa, Homo sapiens
KLETKFKSGLNGSILAERE

SEQ ID NO: 2698 - protein, 27 aa, Homo sapiens
KEKVENGSETGPLPPELQPLLEGEVKG

SEQ ID NO: 2699 - protein, 31 aa, Homo sapiens
KVSGYLNLLANTIDNFTHGLAVAASFLVSKK

SEQ ID NO: 2700 - protein, 16 aa, Homo sapiens
RAVNALPQNMTSQMFS

SEQ ID NO: 2701 - protein, 24 aa, Homo sapiens
RTSRKSALRAGNDSAMADGEGYRN

SEQ ID NO: 2702 - protein, 21 aa, Homo sapiens
KEEQHANTSANYDVELLHHKD

SEQ ID NO: 2703 - protein, 23 aa, Homo sapiens
RNWAHNSSVEASSNLEAPGNERK

SEQ ID NO: 2704 - protein, 26 aa, Homo sapiens
KCPYSQEAMQRALIGRCQNVSALPKG

SEQ ID NO: 2705 - protein, 16 aa, Homo sapiens
MEVNGQNFENITFMKA

SEQ ID NO: 2706 - protein, 28 aa, Homo sapiens
FENKTNLKNQLILGVMGVDVSLEDIKRL

SEQ ID NO: 2707 - protein, 14 aa, Homo sapiens
KIDVNSWIENFTKT

SEQ ID NO: 2708 - protein, 20 aa, Homo sapiens
KISDNNTEFLLNFNEFIDRK

SEQ ID NO: 2709 - protein, 22 aa, Homo sapiens
RLLAEGVCDNDTVPSVSSINRI

SEQ ID NO: 2710 - protein, 24 aa, Homo sapiens
RETQAINSSLSTLGLVIMALSNKE

SEQ ID NO: 2711 - protein, 31 aa, Homo sapiens
KEANPTPLTPGASSLSQLGAYLDSDDSNGSN

SEQ ID NO: 2712 - protein, 16 aa, Homo sapiens
RSCLSCPENTSTVKRG

SEQ ID NO: 2713 - protein, 15 aa, Homo sapiens
KANASEKLGVLTSRE

SEQ ID NO: 2714 - protein, 20 aa, Homo sapiens
RIYIEDNLSNSNEVEMEEKG

SEQ ID NO: 2715 - protein, 23 aa, Homo sapiens
REGKELLLYFDASLEITNVTQKI

SEQ ID NO: 2716 - protein, 27 aa, Homo sapiens
RNLNDSSLFVSAEEFGHLLDENMGSKF

SEQ ID NO: 2717 - protein, 20 aa, Homo sapiens
KWSMVCLLMNGSSHSPTAIN

SEQ ID NO: 2718 - protein, 14 aa, Homo sapiens
RKVLINNSLDEPRA

SEQ ID NO: 2719 - protein, 28 aa, Homo sapiens
KSLNDSIQPDPLCLHNSSLFALQNLQPW

SEQ ID NO: 2720 - protein, 26 aa, Homo sapiens
MSLDFNATGRITAAQLQTMLLEKSRV

SEQ ID NO: 2721 - protein, 23 aa, Homo sapiens
RYGEEYGNLTRPDITFTYFQPKP

SEQ ID NO: 2722 - protein, 25 aa, Homo sapiens
RIVDGIEDGNSSEESQTFDFGSERI

SEQ ID NO: 2723 - protein, 26 aa, Homo sapiens
RELRSALLEFACTHNLGNCSTTAMKL

SEQ ID NO: 2724 - protein, 14 aa, Homo sapiens
KIIYPKNHSIEVQL

SEQ ID NO: 2725 - protein, 17 aa, Homo sapiens
KAVTVMMDPNSTQRYRL

SEQ ID NO: 2726 - protein, 16 aa, Homo sapiens
RFGLLFNQENTTYSKT

SEQ ID NO: 2727 - protein, 19 aa, Homo sapiens
RRTSMHSSLNTSPNQQPDT

SEQ ID NO: 2728 - protein, 27 aa, Homo sapiens
RGKRMRPNSNTPVNETATASDSKGTSN

SEQ ID NO: 2729 - protein, 20 aa, Homo sapiens
RKNKPLSDMELNSSSEDSKG

SEQ ID NO: 2730 - protein, 25 aa, Homo sapiens
KVSQQLGLDAPNGSDSSPQAPPPRR

SEQ ID NO: 2731 - protein, 25 aa, Homo sapiens
SGNKVSITTTPFENTSIKTGPARRN

SEQ ID NO: 2732 - protein, 28 aa, Homo sapiens
RSFSCLNRSLSSGESLPGSPTHSLSPRS

SEQ ID NO: 2733 - protein, 12 aa, Homo sapiens
RLHNGNASPPRV

SEQ ID NO: 2734 - protein, 30 aa, Homo sapiens
RCFLQLQPDNSTLTWVKPTTASPASSKAKL

SEQ ID NO: 2735 - protein, 18 aa, Homo sapiens
TAANNLSVSNSASSLQKD

SEQ ID NO: 2736 - protein, 36 aa, Homo sapiens
RKPPLFNMNAMSALYHIAQNDSPTLQSNEWTDSFRR

SEQ ID NO: 2737 - protein, 21 aa, Homo sapiens
RAAGSAQGNNQACNSTSEVKD

SEQ ID NO: 2738 - protein, 19 aa, Homo sapiens
MTNTSYSEPAQNSKLSLKQ

SEQ ID NO: 2739 - protein, 21 aa, Homo sapiens
WVSREPALLCTFPNPSAPRKD

SEQ ID NO: 2740 - protein, 14 aa, Homo sapiens
PFLSDIHNISTLKI

SEQ ID NO: 2741 - protein, 20 aa, Homo sapiens
RSTVGLSLISPNNMSFATKK

SEQ ID NO: 2742 - protein, 36 aa, Homo sapiens
KEALGSVVAHSTFSAMKANTMSNYTLLPPSLLDHRR

SEQ ID NO: 2743 - protein, 23 aa, Homo sapiens
KRTINSSQEPAPGMKPNWPRSRY

SEQ ID NO: 2744 - protein, 32 aa, Homo sapiens
RGSGAVAEGNRTEAGSQDYSLLQAYYSQESKV

SEQ ID NO: 2745 - protein, 16 aa, Homo sapiens
KNESSPAPPDSDADKL

SEQ ID NO: 2746 - protein, 17 aa, Homo sapiens
RYLLQNTALEVFMANRT

SEQ ID NO: 2747 - protein, 27 aa, Homo sapiens
RCYVNGQLVSYGDMAWHVNTNDSYDKC

SEQ ID NO: 2748 - protein, 31 aa, Homo sapiens
KSMINTTGAVDSGSSSSSSSSSFVNGATSKN

SEQ ID NO: 2749 - protein, 9 aa, Homo sapiens
KQNNSYWRE

SEQ ID NO: 2750 - protein, 17 aa, Homo sapiens
CYEYFHQDDHNNLTDKH

SEQ ID NO: 2751 - protein, 18 aa, Homo sapiens
RNRNLSGGVLMGFMLNRI

SEQ ID NO: 2752 - protein, 28 aa, Homo sapiens
KGLAQPPQAYFNGSLPPQTVGHQAHGRE

SEQ ID NO: 2753 - protein, 18 aa, Homo sapiens
KDENSINGTPDITVEIRE

SEQ ID NO: 2754 - protein, 20 aa, Homo sapiens
KENKGDNNCNHNDPLYENSS

SEQ ID NO: 2755 - protein, 21 aa, Homo sapiens
ASGPVILSELHPICNKSILRQ

SEQ ID NO: 2756 - protein, 18 aa, Homo sapiens
MSLFLSNLSTNDSSLWKE

SEQ ID NO: 2757 - protein, 30 aa, Homo sapiens
RFNNSLLPTEPSQQLQAYVAWVNAQLKKRP

SEQ ID NO: 2758 - protein, 26 aa, Homo sapiens
KEYVKSEVIKLLPNANGSNVQLQLKF

SEQ ID NO: 2759 - protein, 25 aa, Homo sapiens
KGLEWIGYIYYSGSTNYNPSLKSRV

SEQ ID NO: 2760 - protein, 25 aa, Homo sapiens
KYRCNDTIPEDFQEFQTQNFDRFDN

SEQ ID NO: 2761 - protein, 39 aa, Homo sapiens
RNLLETGLNVSDTVTLPTAPNMNSEPTLQPQTGEITNRM

SEQ ID NO: 2762 - protein, 21 aa, Homo sapiens
MDLTLNSSTATPVSPGSVTKE

SEQ ID NO: 2763 - protein, 21 aa, Homo sapiens
RASAGLNSSATSTANNSRCEG

SEQ ID NO: 2764 - protein, 23 aa, Homo sapiens
RSQILEGLGFNLTELSESDVHRG

SEQ ID NO: 2765 - protein, 13 aa, Homo sapiens
KDFYVDENTTVRV

SEQ ID NO: 2766 - protein, 14 aa, Homo sapiens
KFLNDTMAVYEAKL

SEQ ID NO: 2767 - protein, 25 aa, Homo sapiens
DGESCSNSSHQQILETGEGSPSLKI

SEQ ID NO: 2768 - protein, 14 aa, Homo sapiens
KKPKGINSNSTANL

SEQ ID NO: 2769 - protein, 22 aa, Homo sapiens
MTNYSFHCNVCHHSGNTYFLRK

SEQ ID NO: 2770 - protein, 35 aa, Homo sapiens
KEQYQVLIQAKDMGGQLGGLAGTTIVNITLTDVND

SEQ ID NO: 2771 - protein, 11 aa, Homo sapiens
RNSSLVLHHRT

SEQ ID NO: 2772 - protein, 30 aa, Homo sapiens
KSGKGDSTLQVSSGLNENLTVNGGGWNEKS

SEQ ID NO: 2773 - protein, 36 aa, Homo sapiens
KSNGLMFTNIMMQNTNPSASPEYMFSSNIEPEPKDL

SEQ ID NO: 2774 - protein, 30 aa, Homo sapiens
RARGNSSSNHLYGVAEAGAPPADPSTLYRD

SEQ ID NO: 2775 - protein, 22 aa, Homo sapiens
RAWHNLTVLATELDSSAQASRV

SEQ ID NO: 2776 - protein, 28 aa, Homo sapiens
MSGTLVMLLNDSADLRDLATSMDSIVKL

SEQ ID NO: 2777 - protein, 15 aa, Homo sapiens
RTNGDILVLYNLSKH

SEQ ID NO: 2778 - protein, 24 aa, Homo sapiens
KVELPPPDLGPSSALNQTLMLLRE

SEQ ID NO: 2779 - protein, 36 aa, Homo sapiens
LKDENTISPYEMCSSGLVQALLTVLNNVSIFRATKQ

SEQ ID NO: 2780 - protein, 42 aa, Homo sapiens
KEAASQRPLSSSASNRLSVSSLLAAGAPMSSSASVPNLSSRE

SEQ ID NO: 2781 - protein, 28 aa, Homo sapiens
KAQNGIAIMVYTNSSNTLYWELNQAVRT

SEQ ID NO: 2782 - protein, 25 aa, Homo sapiens
KTPASNISTQVSHTKLSVEAPDSKF

SEQ ID NO: 2783 - protein, 14 aa, Homo sapiens
KGFNWSSTLTKHRR

SEQ ID NO: 2784 - protein, 17 aa, Homo sapiens
DAKAQLALSSSANQSKE

SEQ ID NO: 2785 - protein, 21 aa, Homo sapiens
AGLGNGVLPNVSEETVSPTRA

SEQ ID NO: 2786 - protein, 23 aa, Homo sapiens
RLCQTCYPLFQQVVSKMDNISRA

SEQ ID NO: 2787 - protein, 19 aa, Homo sapiens
RTESQLTPCIRNVTSPTRQ

SEQ ID NO: 2788 - protein, 18 aa, Homo sapiens
MQTCGNVSNQFQLGTCRL

SEQ ID NO: 2789 - protein, 23 aa, Homo sapiens
MANVTWPQGPFTTWSTTGDAPVI

SEQ ID NO: 2790 - protein, 26 aa, Homo sapiens
RHVNLSSLVSCLCVNLCSPYLLLRRA

SEQ ID NO: 2791 - protein, 23 aa, Homo sapiens
KEPVGCVNNISFLASLAGSTSRN

SEQ ID NO: 2792 - protein, 17 aa, Homo sapiens
KDFANMTSLVDLTLSRN

SEQ ID NO: 2793 - protein, 17 aa, Homo sapiens
KVSIIPPIALNSTDSDG

SEQ ID NO: 2794 - protein, 27 aa, Homo sapiens
SGEKDESEVISQNETCSPAEVESNEKD

SEQ ID NO: 2795 - protein, 35 aa, Homo sapiens
KGGMNGYHVNGAINDTESVDSLSEGLETLSIDARE

SEQ ID NO: 2796 - protein, 21 aa, Homo sapiens
KNIGAKLVQDVANNTNEEAGD

SEQ ID NO: 2797 - protein, 26 aa, Homo sapiens
RLDLSGNALTEDMAALMLQNLSSLRS

SEQ ID NO: 2798 - protein, 25 aa, Homo sapiens
RSKDGPSYFTVSFNRTFLMMITNKA

SEQ ID NO: 2799 - protein, 23 aa, Homo sapiens
MDPNCSCSTSSSCTCTTSSKSRE

SEQ ID NO: 2800 - protein, 25 aa, Homo sapiens
RSNSTSSMSSGLPEQDRMAMTLPRN

SEQ ID NO: 2801 - protein, 16 aa, Homo sapiens
RRQAPINFTSRLNRRA

SEQ ID NO: 2802 - protein, 17 aa, Homo sapiens
NNESSSEGFICPQCMKS

SEQ ID NO: 2803 - protein, 18 aa, Homo sapiens
KELVQVQTLMDNMTLERE

SEQ ID NO: 2804 - protein, 28 aa, Homo sapiens
KKVTCPPTVTVKDEQSGGGNVSSTLLKQ

SEQ ID NO: 2805 - protein, 28 aa, Homo sapiens
KMNGTLTAVESFLTIHSGPEGLSIHDGT

SEQ ID NO: 2806 - protein, 21 aa, Homo sapiens
KMEVGIEDCLHIEFEYNKSKY

SEQ ID NO: 2807 - protein, 11 aa, Homo sapiens
RLNGSAAGHVL

SEQ ID NO: 2808 - protein, 20 aa, Homo sapiens
KGTNVSAPDQLSLALAWNRV

SEQ ID NO: 2809 - protein, 25 aa, Homo sapiens
RQLVEMEYTMQQCNASVYMEAKNRG

SEQ ID NO: 2810 - protein, 21 aa, Homo sapiens
RSRNKYGRGSISLNSSPRGRY

SEQ ID NO: 2811 - protein, 30 aa, Homo sapiens
AKENENSSPVAGAFGVFSTISTAVQSTGKS

SEQ ID NO: 2812 - protein, 29 aa, Homo sapiens
KALDFSLDGNINLTELTLALEYELLVTKN

SEQ ID NO: 2813 - protein, 17 aa, Homo sapiens
RYDAQLILENNSGIPKL

SEQ ID NO: 2814 - protein, 22 aa, Homo sapiens
DMVVMLLSLLEGNVVNGTIGKQ

SEQ ID NO: 2815 - protein, 19 aa, Homo sapiens
DLNKNCTVTVTLGDERGRV

SEQ ID NO: 2816 - protein, 29 aa, Homo sapiens
KQMLIVITDGESHDHDQLNDTALELRNKG

SEQ ID NO: 2817 - protein, 22 aa, Homo sapiens
KHTGTIPGAQGLMNSSLLHQDI

SEQ ID NO: 2818 - protein, 22 aa, Homo sapiens
KGKNFNDNHSFLTNDELAVLPV

SEQ ID NO: 2819 - protein, 11 aa, Homo sapiens
REEQYNSTYRV

SEQ ID NO: 2820 - protein, 21 aa, Homo sapiens
KEVNSSLHLGHAGSSPHALAS

SEQ ID NO: 2821 - protein, 13 aa, Homo sapiens
SYFKCGENVSQKN

SEQ ID NO: 2822 - protein, 35 aa, Homo sapiens
CFENVTSIMFLVALSEYDRVLVESDNENRMEESKA

SEQ ID NO: 2823 - protein, 17 aa, Homo sapiens
RDNANNSPYLQMNSLRA

SEQ ID NO: 2824 - protein, 25 aa, Homo sapiens
NASLLIQNVTQEDTGSYTLHIIKRG

SEQ ID NO: 2825 - protein, 34 aa, Homo sapiens
KAGMNIARLNFSHGSHEYHAESIANVREAVESFA

SEQ ID NO: 2826 - protein, 27 aa, Homo sapiens
RNGGTNEESNSSGNTNTDPPAEDSQKS

SEQ ID NO: 2827 - protein, 34 aa, Homo sapiens
LCADDAKTHHWNITAVKLALVCSSEGSPGGTARG

SEQ ID NO: 2828 - protein, 15 aa, Homo sapiens
RSSTSSIDSNISSKS

SEQ ID NO: 2829 - protein, 26 aa, Homo sapiens
QHSLNLTESTSLDMLLDDTGECSARK

SEQ ID NO: 2830 - protein, 26 aa, Homo sapiens
MDPNCSCAAGDSCTCAGSCKCKECKC

SEQ ID NO: 2831 - protein, 18 aa, Homo sapiens
RTPYRDMMLENYSLLLSV

SEQ ID NO: 2832 - protein, 10 aa, Homo sapiens
RWEYCNLTRC

SEQ ID NO: 2833 - protein, 32 aa, Homo sapiens
KSSSGNENDEQDSDNANMSTQSPVSSEEYDRT

SEQ ID NO: 2834 - protein, 35 aa, Homo sapiens
RKMSAPAQPPAEGTEGTAPGGGPPGPPPNMTSNRR

SEQ ID NO: 2835 - protein, 21 aa, Homo sapiens
KSFSLNRTLTVHQRIHTGEKP

SEQ ID NO: 2836 - protein, 14 aa, Homo sapiens
RHAQNVTVDEVIGA

SEQ ID NO: 2837 - protein, 41 aa, Homo sapiens
RTGPNPGAGQNPTRTGPNPGTGQNPTRTGPNPGTGQNPTRT

SEQ ID NO: 2838 - protein, 17 aa, Homo sapiens
KEAFAAALNANNSMSKK

SEQ ID NO: 2839 - protein, 24 aa, Homo sapiens
NMINATIKQDDPFNIDLGQQSQRS

SEQ ID NO: 2840 - protein, 36 aa, Homo sapiens
KDVISNTSDVIGTCEAADVAQKVDEDSAEDTQSNDG

SEQ ID NO: 2841 - protein, 28 aa, Homo sapiens
KMNELENKAEPGTHLCIDVEDAMNITRK

SEQ ID NO: 2842 - protein, 26 aa, Homo sapiens
RAWPKMHTVNGYVNRSLPGLIGCHRK

SEQ ID NO: 2843 - protein, 27 aa, Homo sapiens
RCITCAVVGNGGILNNSHIGQEIDSHD

SEQ ID NO: 2844 - protein, 28 aa, Homo sapiens
MIYIPNATASLNLALSLLLFLEIYNERV

SEQ ID NO: 2845 - protein, 36 aa, Homo sapiens
RNKSSMVVIDVKMLSGFTPTMSSIEELENKGQVMKT

SEQ ID NO: 2846 - protein, 29 aa, Homo sapiens
RRLCTNLVVNCWVLGFIWFLIPIVNISQM

SEQ ID NO: 2847 - protein, 18 aa, Homo sapiens
DPFDNSSRPSQVVAETRK

SEQ ID NO: 2848 - protein, 26 aa, Homo sapiens
MAAFSVGTAMNASSYSAEMTEPKSVC

SEQ ID NO: 2849 - protein, 18 aa, Homo sapiens
QVNQSATALKHVFASLRL

SEQ ID NO: 2850 - protein, 26 aa, Homo sapiens
LEEDSVVHSVENDSQNMMESLSPKKY

SEQ ID NO: 2851 - protein, 20 aa, Homo sapiens
MKGLTTTGNSSLNSTSNTKV

SEQ ID NO: 2852 - protein, 19 aa, Homo sapiens
AANNCTVNTSSVATSSMKG

SEQ ID NO: 2853 - protein, 11 aa, Homo sapiens
KTWNQSIALRL

SEQ ID NO: 2854 - protein, 22 aa, Homo sapiens
KDPKEKQIEPAMTSQNSKRNTS

SEQ ID NO: 2855 - protein, 37 aa, Homo sapiens
KAVQEDEVGVPGSNSADLLRWTTATTMKVLSNTTTTT

SEQ ID NO: 2856 - protein, 11 aa, Homo sapiens
REEQYNSTFRV

SEQ ID NO: 2857 - protein, 18 aa, Homo sapiens
NGRENVGIYNLSKGVNRF

SEQ ID NO: 2858 - protein, 32 aa, Homo sapiens
RVTNSNANAASPLIVAGYNVSGSVRSDGEPMK

SEQ ID NO: 2859 - protein, 35 aa, Homo sapiens
MNTQAPPYSMAPAMVNSSAASVGLADMMSPGESKL

SEQ ID NO: 2860 - protein, 17 aa, Homo sapiens
RHLTSLNLVQNNFSPKG

SEQ ID NO: 2861 - protein, 21 aa, Homo sapiens
RDLAELKSSLVNESEGAAGGA

SEQ ID NO: 2862 - protein, 26 aa, Homo sapiens
RGGLGGGYSGASGMGGITAVMVNQSL

SEQ ID NO: 2863 - protein, 38 aa, Homo sapiens
KLVGFPAYGHSFLLSNPSNHGIDAPTTGPGPAGPYTRQ

SEQ ID NO: 2864 - protein, 16 aa, Homo sapiens
SANTTIEDEDAKARKQ

SEQ ID NO: 2865 - protein, 34 aa, Homo sapiens
RRLTIEGVLDHPWLNSTEALDNVLPSAQLMMDKA

SEQ ID NO: 2866 - protein, 15 aa, Homo sapiens
RRIWEETGNYTFSSD

SEQ ID NO: 2867 - protein, 25 aa, Homo sapiens
RFCHEVKINYSPYVNYFTRVYWNRS

SEQ ID NO: 2868 - protein, 20 aa, Homo sapiens
KVLFICTANVTDTIPEPLRD

SEQ ID NO: 2869 - protein, 21 aa, Homo sapiens
KGRNTSSAVEMPFRNSKRSRL

SEQ ID NO: 2870 - protein, 35 aa, Homo sapiens
RLPNTYPNSSSPGPGGLGGSVHYATMARSAVRPAS

SEQ ID NO: 2871 - protein, 15 aa, Homo sapiens
NQNGAEGDQINASKN

SEQ ID NO: 2872 - protein, 19 aa, Homo sapiens
RTLIAPQGYPNPENFSWTE

SEQ ID NO: 2873 - protein, 19 aa, Homo sapiens
RSLAEANNLSFPLEPLSRE

SEQ ID NO: 2874 - protein, 18 aa, Homo sapiens
GECGKCFNNNSNLSKHKK

SEQ ID NO: 2875 - protein, 24 aa, Homo sapiens
RGNCDSSGMNLNNISELIISNRSS

SEQ ID NO: 2876 - protein, 23 aa, Homo sapiens
RSILELSPQPKNFNRTATGWRLQ

SEQ ID NO: 2877 - protein, 10 aa, Homo sapiens
MLRNVTQMSK

SEQ ID NO: 2878 - protein, 19 aa, Homo sapiens
KMSISPNTTYPSLLEDGRV

SEQ ID NO: 2879 - protein, 19 aa, Homo sapiens
RLTCNATGAPSPTLMWLKD

SEQ ID NO: 2880 - protein, 12 aa, Homo sapiens
RKFLQENASGRG

SEQ ID NO: 2881 - protein, 15 aa, Homo sapiens
KTKATQSQRRNSSKT

SEQ ID NO: 2882 - protein, 15 aa, Homo sapiens
KRPNENSSADISGKT

SEQ ID NO: 2883 - protein, 28 aa, Homo sapiens
KNEIQSFLVSDPENTTWADIEAMVSVTL

SEQ ID NO: 2884 - protein, 23 aa, Homo sapiens
RKYGSCSTILLDNSTASQPDLRH

SEQ ID NO: 2885 - protein, 27 aa, Homo sapiens
YNFTYTGDGDITLITDNNGNMVNVRRD

SEQ ID NO: 2886 - protein, 32 aa, Homo sapiens
KNVIFSPLSISTALAFLSLGAHNTTLTEILKG

SEQ ID NO: 2887 - protein, 22 aa, Homo sapiens
RTLNQSSDELQLSMGNAMFVKE

SEQ ID NO: 2888 - protein, 22 aa, Homo sapiens
KFNLTETSEAEIHQSFQHLLRT

SEQ ID NO: 2889 - protein, 18 aa, Homo sapiens
KYTGNASALFILPDQDKM

SEQ ID NO: 2890 - protein, 16 aa, Homo sapiens
SPLDEENLTQENQDRG

SEQ ID NO: 2891 - protein, 13 aa, Homo sapiens
KLINDYVKNGTRG

SEQ ID NO: 2892 - protein, 23 aa, Homo sapiens
KSTGKPTLYNVSLVMSDTAGTCY

SEQ ID NO: 2893 - protein, 37 aa, Homo sapiens
MNTGMNAGMNPGMLAAGNGQGIMPNQVMNGSIGAGRG

SEQ ID NO: 2894 - protein, 35 aa, Homo sapiens
KKENVAADIPITETEAYQLLKKATLQDNTNQTENR

SEQ ID NO: 2895 - protein, 24 aa, Homo sapiens
KSSLVNESETNQNSSSDSEAERRP

SEQ ID NO: 2896 - protein, 37 aa, Homo sapiens
KIDRLDGTPQEPLCGFSKQMVEIVHKHNISLAVLMSL

SEQ ID NO: 2897 - protein, 17 aa, Homo sapiens
KGKNLSLSLDALFMGKS

SEQ ID NO: 2898 - protein, 18 aa, Homo sapiens
MENYSSLVSLETHTGEKL

SEQ ID NO: 2899 - protein, 27 aa, Homo sapiens
KANQENQALSKKLNDTHNELNDIKQKV

SEQ ID NO: 2900 - protein, 38 aa, Homo sapiens
KSSKDGNSVMSPLFISTFTLNISHTASEGATGENLAKV

SEQ ID NO: 2901 - protein, 39 aa, Homo sapiens
RNDMTYNYANRQSTGSAPQGPAYHGVNRTDEVLHTDQRA

SEQ ID NO: 2902 - protein, 23 aa, Homo sapiens
KNISNPPDMSGWNPFGEDNFSKL

SEQ ID NO: 2903 - protein, 19 aa, Homo sapiens
KKKKALSSMGANYSSYLAK

SEQ ID NO: 2904 - protein, 13 aa, Homo sapiens
KGELNTSIFSSRP

SEQ ID NO: 2905 - protein, 18 aa, Homo sapiens
KLLHALGGDDFLGMLNRT

SEQ ID NO: 2906 - protein, 14 aa, Homo sapiens
RLAENSGNASTERN

SEQ ID NO: 2907 - protein, 27 aa, Homo sapiens
MKFRGNGALSNISDLPFLAENSAFPKM

SEQ ID NO: 2908 - protein, 26 aa, Homo sapiens
KRADKYWEYTFKVNWSDLSVTTVTKT

SEQ ID NO: 2909 - protein, 22 aa, Homo sapiens
RGHKISDYFEYQGGNGSSPVRG

SEQ ID NO: 2910 - protein, 26 aa, Homo sapiens
KVGMHCSGPLGGLLQLAAEVNVTSRV

SEQ ID NO: 2911 - protein, 22 aa, Homo sapiens
KKEYNVNDDSMKLGGNNTSEKA

SEQ ID NO: 2912 - protein, 30 aa, Homo sapiens
KAGGVGLNLSAASRVFLMDPAWNPAAEDQC

SEQ ID NO: 2913 - protein, 21 aa, Homo sapiens
RYDFDLFANESVPDHVGYAKV

SEQ ID NO: 2914 - protein, 28 aa, Homo sapiens
RDDFRQNPSDVMVAVGEPAVMECQPPRG

SEQ ID NO: 2915 - protein, 27 aa, Homo sapiens
RKKKINGSSPDTATSGGYHSPGDSATG

SEQ ID NO: 2916 - protein, 26 aa, Homo sapiens
RYSWQCVNQSVLCGPSGNHTDIETKQ

SEQ ID NO: 2917 - protein, 25 aa, Homo sapiens
MTIWILKVMNFTIDGMGNLRITEKG

SEQ ID NO: 2918 - protein, 17 aa, Homo sapiens
KEWFNTDSMTLNNTAYL

SEQ ID NO: 2919 - protein, 32 aa, Homo sapiens
MFPVLFPFNPSSLTMDSIHIPACLNLEFLNEV

SEQ ID NO: 2920 - protein, 22 aa, Homo sapiens
LALANSSQANDCLDSFASPNKT

SEQ ID NO: 2921 - protein, 41 aa, Homo sapiens
TLMAAFQGPGEDFIGGSIFVNVTMFSSGGEMVQAETSGVKI

SEQ ID NO: 2922 - protein, 25 aa, Homo sapiens
KNMAQETNQTPGPMLCSTGCGFYGN

SEQ ID NO: 2923 - protein, 32 aa, Homo sapiens
RCCYSLGNGSSGFRFLKYGGCGFPSLSYGSRF

SEQ ID NO: 2924 - protein, 22 aa, Homo sapiens
KNGQDHLNISSMTAAQEGTYTC

SEQ ID NO: 2925 - protein, 16 aa, Homo sapiens
KTTEFDTNSTDIALKV

SEQ ID NO: 2926 - protein, 35 aa, Homo sapiens
RSPSPSKNDSFFTPDSNHNSLSQSTTGHLSLPQKQ

SEQ ID NO: 2927 - protein, 21 aa, Homo sapiens
KALTNGSFSPSGNNGSVNWRT

SEQ ID NO: 2928 - protein, 26 aa, Homo sapiens
KGLRGPGSIGSEPDFWNGSGSSRVKG

SEQ ID NO: 2929 - protein, 22 aa, Homo sapiens
KLEEYKEAFAVALKANNSMSKK

SEQ ID NO: 2930 - protein, 20 aa, Homo sapiens
KHTGPGILSMANAGPNTNGS

SEQ ID NO: 2931 - protein, 29 aa, Homo sapiens
KHTGPGILSMANAGPNMNGSQFFICTAKT

SEQ ID NO: 2932 - protein, 14 aa, Homo sapiens
KRSHNASIIDMGEE

SEQ ID NO: 2933 - protein, 12 aa, Homo sapiens
LQLANHSGYIKV

SEQ ID NO: 2934 - protein, 14 aa, Homo sapiens
RNYSSIHSQSRSTS

SEQ ID NO: 2935 - protein, 33 aa, Homo sapiens
KADETVTEMNFSNEYNKSELMLQENQMIADGKE

SEQ ID NO: 2936 - protein, 28 aa, Homo sapiens
RRGSEVISNTTEDTQLTSETQSLTGNKK

SEQ ID NO: 2937 - protein, 20 aa, Homo sapiens
REAYSPLELLDNLSGADVRQ

SEQ ID NO: 2938 - protein, 17 aa, Homo sapiens
KITKNFSEVGFPDILKA

SEQ ID NO: 2939 - protein, 18 aa, Homo sapiens
KQIKNSSLLSFDNEDENE

SEQ ID NO: 2940 - protein, 25 aa, Homo sapiens
RFARHPFYGSAGVNSGVMLMNLTRI

SEQ ID NO: 2941 - protein, 31 aa, Homo sapiens
MSTISCHQDVILSMSFNTNGSLLATTCKDRK

SEQ ID NO: 2942 - protein, 39 aa, Homo sapiens
KSPPRKINSSPNVNTTASGVEDLNIIQVTIPDDDNERLS

SEQ ID NO: 2943 - protein, 16 aa, Homo sapiens
IFKNATFTFTWAFQRT

SEQ ID NO: 2944 - protein, 43 aa, Homo sapiens
KNSLSGIAMNVPASRGSNLNSSGANRTSLSGGTGSGTQGATKP

SEQ ID NO: 2945 - protein, 27 aa, Homo sapiens
KSSSSLGNATSDEDPNTNIMNINENKN

SEQ ID NO: 2946 - protein, 16 aa, Homo sapiens
RQHNVINLSSLDAMMD

SEQ ID NO: 2947 - protein, 23 aa, Homo sapiens
MGYLCTHQLLFLQLNQSSFNSKN

SEQ ID NO: 2948 - protein, 18 aa, Homo sapiens
KFSPSDTDENATNTQSTT

SEQ ID NO: 2949 - protein, 26 aa, Homo sapiens
TTAQLSWRPGPDNHSPITMYVIQART

SEQ ID NO: 2950 - protein, 24 aa, Homo sapiens
RSRDFSAAPQNTTQNFLVNGRIRK

SEQ ID NO: 2951 - protein, 21 aa, Homo sapiens
KNMSVTFALDEPMKEGECSRR

SEQ ID NO: 2952 - protein, 17 aa, Homo sapiens
RNSRMNFTYQIADCNRD

SEQ ID NO: 2953 - protein, 30 aa, Homo sapiens
RMDVSSNSSPSCQASPSQEDVSADMQERRG

SEQ ID NO: 2954 - protein, 27 aa, Homo sapiens
KNLSEMQDLEEIRKITGVCPQFNVQFD

SEQ ID NO: 2955 - protein, 20 aa, Homo sapiens
KVDMHDDSLNTTANLIWNKL

SEQ ID NO: 2956 - protein, 16 aa, Homo sapiens
RVRRASCEPANGSGRS

SEQ ID NO: 2957 - protein, 20 aa, Homo sapiens
KILHNVSEDPSFVISQHIRK

SEQ ID NO: 2958 - protein, 21 aa, Homo sapiens
KDYNASASTISPPSSMEEDKF

SEQ ID NO: 2959 - protein, 17 aa, Homo sapiens
RELAGNTSSPPLSPGRP

SEQ ID NO: 2960 - protein, 26 aa, Homo sapiens
KVNPTLVIQPTNLSARLETDVECLKL

SEQ ID NO: 2961 - protein, 29 aa, Homo sapiens
MTNASNSQQSISMQQFSQTSNPSAHFHKC

SEQ ID NO: 2962 - protein, 16 aa, Homo sapiens
KAIESGTEWNLSLLKL

SEQ ID NO: 2963 - protein, 28 aa, Homo sapiens
VFDASAPAHCGVRVGLSAQPCPNKSSKA

SEQ ID NO: 2964 - protein, 20 aa, Homo sapiens
KLKMLTNPSTANSNLLLHQS

SEQ ID NO: 2965 - protein, 33 aa, Homo sapiens
KAAIQGNGDVGAAAATAHNGFSCSNCSMLSERK

SEQ ID NO: 2966 - protein, 18 aa, Homo sapiens
RVEGLFLTLSGSNLTVKV

SEQ ID NO: 2967 - protein, 16 aa, Homo sapiens
RFAVQLYNTNQNTTEK

SEQ ID NO: 2968 - protein, 17 aa, Homo sapiens
NIAPNISRAEIISLCKR

SEQ ID NO: 2969 - protein, 10 aa, Homo sapiens
KISNNITLRE

SEQ ID NO: 2970 - protein, 16 aa, Homo sapiens
KKSNQLENHTIVGTRS

SEQ ID NO: 2971 - protein, 21 aa, Homo sapiens
RRFGILSNCNHTYCLKCIRKW

SEQ ID NO: 2972 - protein, 27 aa, Homo sapiens
VYIVQSGCGEINDSLMELLIMINACKI

SEQ ID NO: 2973 - protein, 25 aa, Homo sapiens
KVARLEQNGSPMGARGRPNGAVAKA

SEQ ID NO: 2974 - protein, 25 aa, Homo sapiens
RMENANLPTKQEPSWINQSEQGIKE

SEQ ID NO: 2975 - protein, 26 aa, Homo sapiens
KNVTESPSFSAGDNPPVLFSSDFRIS

SEQ ID NO: 2976 - protein, 19 aa, Homo sapiens
KTGHRMERPDNCSEEMYRL

SEQ ID NO: 2977 - protein, 22 aa, Homo sapiens
RNRKQGVLAVIDAYNTSNKETK

SEQ ID NO: 2978 - protein, 27 aa, Homo sapiens
RTINVSNLYVGGIPEGEGTSLLTMRRS

SEQ ID NO: 2979 - protein, 21 aa, Homo sapiens
RQTNESLLILRAIPEGIRDKG

SEQ ID NO: 2980 - protein, 28 aa, Homo sapiens
KVDSEENTLNSQTNATSGMNPDGVLSKM

SEQ ID NO: 2981 - protein, 25 aa, Homo sapiens
RGCNVNSTSSAGNTALHVAVMRNRF

SEQ ID NO: 2982 - protein, 18 aa, Homo sapiens
KECCNAFNQSSALTNHKR

SEQ ID NO: 2983 - protein, 21 aa, Homo sapiens
KFEENTSNSQWHVSLSVSFKK

SEQ ID NO: 2984 - protein, 13 aa, Homo sapiens
RGLNVTLSSTGRN

SEQ ID NO: 2985 - protein, 18 aa, Homo sapiens
RFSDGLESNSSTQFEVKK

SEQ ID NO: 2986 - protein, 16 aa, Homo sapiens
KNTTCQDLQIEVTVKG

SEQ ID NO: 2987 - protein, 36 aa, Homo sapiens
KNLTVSVHVSPVEGLCLAGGGGLAQQVLVPAGSARP

SEQ ID NO: 2988 - protein, 26 aa, Homo sapiens
KLPCSENPRDTEDVPWITLNSSIQKV

SEQ ID NO: 2989 - protein, 20 aa, Homo sapiens
RNEMLEIQVFNYSKVFSNKL

SEQ ID NO: 2990 - protein, 38 aa, Homo sapiens
RSSDMDQQEDMISGVENSNVSENDIPFNVQYPGQTSKT

SEQ ID NO: 2991 - protein, 30 aa, Homo sapiens
DEPTVVPTTSARMESQATSASINNSNPSTS

SEQ ID NO: 2992 - protein, 17 aa, Homo sapiens
KLQLWTNGSVAYSVARE

SEQ ID NO: 2993 - protein, 15 aa, Homo sapiens
QNSELQAKTNETEKA

SEQ ID NO: 2994 - protein, 18 aa, Homo sapiens
RDGKNATTDALTSVLTKI

SEQ ID NO: 2995 - protein, 22 aa, Homo sapiens
KDEHAQSNEIVVNDSGSDNVKK

SEQ ID NO: 2996 - protein, 29 aa, Homo sapiens
KHTGPGILSMANAGPITNSSQFFICTAKT

SEQ ID NO: 2997 - protein, 27 aa, Homo sapiens
AGQVLENLPPIGVFWDIENCSVPSGRS

SEQ ID NO: 2998 - protein, 18 aa, Homo sapiens
VIHNASIMNAEAAGGYRY

SEQ ID NO: 2999 - protein, 27 aa, Homo sapiens
MILLNNSQKLLVLYKPLAWSIPESLKV

SEQ ID NO: 3000 - protein, 28 aa, Homo sapiens
KVPPTVCPFHSLNNVTKAGEGSWLESKR

SEQ ID NO: 3001 - protein, 17 aa, Homo sapiens
KASGQVIDEIAGNFSRA

SEQ ID NO: 3002 - protein, 22 aa, Homo sapiens
KGLVEGVYCNLTEAFEIPACKY

SEQ ID NO: 3003 - protein, 23 aa, Homo sapiens
KQMESSEGSSNTTEATSGSGVRG

SEQ ID NO: 3004 - protein, 29 aa, Homo sapiens
RSTNHSTQSALNQSLHTVGAQPITAHSRR

SEQ ID NO: 3005 - protein, 17 aa, Homo sapiens
RRRNITVGLAVFATGRF

SEQ ID NO: 3006 - protein, 20 aa, Homo sapiens
RVGECSCQVSLMLQNSSARA

SEQ ID NO: 3007 - protein, 28 aa, Homo sapiens
KINSSSVCVSSISENDNGISFTCRLGRD

SEQ ID NO: 3008 - protein, 34 aa, Homo sapiens
RGENVSTTEVEGVLSRLLGQTDVAVYGVAVPGKL

SEQ ID NO: 3009 - protein, 28 aa, Homo sapiens
KKVIFSEEITNLSQMTLNVQGPSCILKK

SEQ ID NO: 3010 - protein, 33 aa, Homo sapiens
KLNTTISTTSKGTLLPNSIMTSTLKDQGGISRT

SEQ ID NO: 3011 - protein, 25 aa, Homo sapiens
PPTLVPLMNGSATPLPTALGLGGRA

SEQ ID NO: 3012 - protein, 18 aa, Homo sapiens
RFFVELVGHYSLNMTVTE

SEQ ID NO: 3013 - protein, 31 aa, Homo sapiens
MNATNHAILQSLVHLMKPNAVPKACCAPTKL

SEQ ID NO: 3014 - protein, 25 aa, Homo sapiens
RFHFQGPCGRMLPEPLAGHENETVS

SEQ ID NO: 3015 - protein, 36 aa, Homo sapiens
RLYMLSFLPFLVLLVLIRNLRILTIFSMLANISMLV

SEQ ID NO: 3016 - protein, 16 aa, Homo sapiens
RRRRPGHGSLTNISRH

SEQ ID NO: 3017 - protein, 11 aa, Homo sapiens
GVNATATADRL

SEQ ID NO: 3018 - protein, 15 aa, Homo sapiens
RTTASTNMNASSSRS

SEQ ID NO: 3019 - protein, 21 aa, Homo sapiens
RSLSWTMGMEGLLQNSTNFVL

SEQ ID NO: 3020 - protein, 27 aa, Homo sapiens
RLKYQAQNITSGDTTTILPAACCTMKS

SEQ ID NO: 3021 - protein, 18 aa, Homo sapiens
KLDKLLKLRELNLSYNKI

SEQ ID NO: 3022 - protein, 24 aa, Homo sapiens
KNENETILNPEEVALLEEYIPTRH

SEQ ID NO: 3023 - protein, 29 aa, Homo sapiens
KYTGSGILSMANAVLNTNGSHFFICTAKT

SEQ ID NO: 3024 - protein, 26 aa, Homo sapiens
RRPAAVGAGLQNMGNTCYVNASLQCL

SEQ ID NO: 3025 - protein, 16 aa, Homo sapiens
RQVYNATIAEHAPVGH

SEQ ID NO: 3026 - protein, 32 aa, Homo sapiens
KNPTDACLDAVMNEAPGPINFTMLLAMFGKKL

SEQ ID NO: 3027 - protein, 32 aa, Homo sapiens
PFRMVNETHLDEIFASNTFAPILLTKGLLAKK

SEQ ID NO: 3028 - protein, 29 aa, Homo sapiens
MVNHTMFFDVAVDSEPLDHVSFELFAEKF

SEQ ID NO: 3029 - protein, 24 aa, Homo sapiens
KAREDIFMETLNNIMEYYNDSNGQ

SEQ ID NO: 3030 - protein, 28 aa, Homo sapiens
MDSSCHNATTKMLATAPARGNMMSTSKP

SEQ ID NO: 3031 - protein, 23 aa, Homo sapiens
PEVLSPLTLVNTSGEAQGTVDRV

SEQ ID NO: 3032 - protein, 27 aa, Homo sapiens
RRPAAVGAGLQNMGNTCYENASLQCLT

SEQ ID NO: 3033 - protein, 24 aa, Homo sapiens
KAQLIGPLVFGGMNLTRDELGWKL

SEQ ID NO: 3034 - protein, 34 aa, Homo sapiens
KHMGSASEDSMGPPRVGRVLPTTNGTFPVCIWRG

SEQ ID NO: 3035 - protein, 18 aa, Homo sapiens
KKNTFNFTLISWHSGLKD

SEQ ID NO: 3036 - protein, 27 aa, Homo sapiens
RIAIHALATNMGAGTEGANASYILIRD

SEQ ID NO: 3037 - protein, 23 aa, Homo sapiens
RYGEEYGNLTRPDITFTYFQPKP

SEQ ID NO: 3038 - protein, 32 aa, Homo sapiens
KFLVHDINELEVLMMCNKSYCAKIAHNVSSKN

SEQ ID NO: 3039 - protein, 24 aa, Homo sapiens
RTEGNIFDSLIGGNASAEGPEGKG

SEQ ID NO: 3040 - protein, 27 aa, Homo sapiens
VLEMEEAGSIFACNMEGRSNSSGEVKY

SEQ ID NO: 3041 - protein, 9 aa, Homo sapiens
RWNTTYRRY

SEQ ID NO: 3042 - protein, 28 aa, Homo sapiens
MRDSEATGSASSAQDSTSENSSSVGGRC

SEQ ID NO: 3043 - protein, 23 aa, Homo sapiens
RVAVVQHAPSESVDNASMPPVKV

SEQ ID NO: 3044 - protein, 37 aa, Homo sapiens
RKQPMTLTVTSFNASTGRVNATLSNSNMELLLSGVYK

SEQ ID NO: 3045 - protein, 19 aa, Homo sapiens
RCEALCGGNITAMNGTIYS

SEQ ID NO: 3046 - protein, 19 aa, Homo sapiens
KFVSDATDYAAGFNLTYKA

SEQ ID NO: 3047 - protein, 18 aa, Homo sapiens
PTFSLPLQLPPPVNTSKL

SEQ ID NO: 3048 - protein, 14 aa, Homo sapiens
KAFRNHSFLLIHQR

SEQ ID NO: 3049 - protein, 24 aa, Homo sapiens
KGEERSSCISGNNFSWSLQWNGKE

SEQ ID NO: 3050 - protein, 28 aa, Homo sapiens
MDSSLVSQQPPDNQEKERLNTSIPQKRK

SEQ ID NO: 3051 - protein, 16 aa, Homo sapiens
RRTPEEAAAGEVNLSS

SEQ ID NO: 3052 - protein, 19 aa, Homo sapiens
RSPCSINASISSITSYTCF

SEQ ID NO: 3053 - protein, 18 aa, Homo sapiens
LFNSNNFDLGCKQNGTKL

SEQ ID NO: 3054 - protein, 25 aa, Homo sapiens
KLNNPKDFQELNKQTKKNMTIDGKE

SEQ ID NO: 3055 - protein, 20 aa, Homo sapiens
MLNLSSYPIWVSLFRGSPRR

SEQ ID NO: 3056 - protein, 28 aa, Homo sapiens
MPQPGCNLLNGTQEIGPVGMTENCNRKD

SEQ ID NO: 3057 - protein, 21 aa, Homo sapiens
RSRHENTSQVPLQESRTRKRR

SEQ ID NO: 3058 - protein, 30 aa, Homo sapiens
RKNYTSTELTVEPEEPSDSSGINLSGFGRN

SEQ ID NO: 3059 - protein, 21 aa, Homo sapiens
CTADNSYGPVQSMVLNVTVRE

SEQ ID NO: 3060 - protein, 21 aa, Homo sapiens
QPANSNNGTSTATSTNNNAKR

SEQ ID NO: 3061 - protein, 24 aa, Homo sapiens
SAYDSNDPDVESNSSSGISSPSRQ

SEQ ID NO: 3062 - protein, 15 aa, Homo sapiens
IFPLLYVELNDSAKQ

SEQ ID NO: 3063 - protein, 25 aa, Homo sapiens
KYKDQWGQQGLYHCPNFSDVMGNKT

SEQ ID NO: 3064 - protein, 22 aa, Homo sapiens
KVYENTTLGFIVEVEGLPVPGV

SEQ ID NO: 3065 - protein, 20 aa, Homo sapiens
KEKIPSPETLQPDTHNISKS

SEQ ID NO: 3066 - protein, 26 aa, Homo sapiens
KCVAENNSGAVESVSDLTVEPVTYRE

SEQ ID NO: 3067 - protein, 18 aa, Homo sapiens [sequence omitted]

SEQ ID NO: 3068 - protein, 13 aa, Homo sapiens
LQGLPGSSGNMTN

SEQ ID NO: 3069 - protein, 17 aa, Homo sapiens
RLAFATMFNSSEQSQKG

SEQ ID NO: 3070 - protein, 19 aa, Homo sapiens
KYEFCPFHNVTQHEQTFRW

SEQ ID NO: 3071 - protein, 44 aa, Homo sapiens
KVSLGAVYFFMNGTYGLAFWYGTSLILNGEPGYTIGTVLAVKRK

SEQ ID NO: 3072 - protein, 19 aa, Homo sapiens
KHVEVNGSKTAGANTTDKE

SEQ ID NO: 3073 - protein, 22 aa, Homo sapiens
EQLNQTLAEMKAQEVAELKRKK

SEQ ID NO: 3074 - protein, 22 aa, Homo sapiens
PMDEYSNQNNFVHDCVNITIKQ

SEQ ID NO: 3075 - protein, 25 aa, Homo sapiens
RTITNVSDEVSSEEGPETGYSLRRH

SEQ ID NO: 3076 - protein, 23 aa, Homo sapiens
SAAQNPMMTNASATQATLTAQRF

SEQ ID NO: 3077 - protein, 16 aa, Homo sapiens
RIYTSGSTNYNPSLKS

SEQ ID NO: 3078 - protein, 23 aa, Homo sapiens
RGLTFQQNASSMCGPDQDTAIRV

SEQ ID NO: 3079 - protein, 15 aa, Homo sapiens
KNLNLELNPNQSVKV

SEQ ID NO: 3080 - protein, 29 aa, Homo sapiens
MIPCVLQYLNFSTIIGVGVGAGAYILARY

SEQ ID NO: 3081 - protein, 29 aa, Homo sapiens
TTTATFTTNTTTTITSGFTVNQNQLLSRG

SEQ ID NO: 3082 - protein, 23 aa, Homo sapiens
KGDVSLTIENVTLADSGIYCCRI

SEQ ID NO: 3083 - protein, 25 aa, Homo sapiens
EGEKDPWGVSMMNTSFAGGQIHQDI

SEQ ID NO: 3084 - protein, 24 aa, Homo sapiens
RSAPVPVTTQNPPGAPPNVSGRRH

SEQ ID NO: 3085 - protein, 18 aa, Homo sapiens
MIFENPSLCASNSEPLKL

SEQ ID NO: 3086 - protein, 9 aa, Homo sapiens
FTVFTNNTH

SEQ ID NO: 3087 - protein, 17 aa, Homo sapiens
RSSNLTTHKIIHTGEKP

SEQ ID NO: 3088 - protein, 13 aa, Homo sapiens
RLGPVSTANMSRP

SEQ ID NO: 3089 - protein, 12 aa, Homo sapiens
KQNTTLGLSERP

SEQ ID NO: 3090 - protein, 29 aa, Homo sapiens
RYDLTGWLHRAKPNLSALDAPQVLHQSKR

SEQ ID NO: 3091 - protein, 15 aa, Homo sapiens
KSPLFMGKVVNPTQK

SEQ ID NO: 3092 - protein, 25 aa, Homo sapiens
RNGYGFINRNDTKEDVFVHQTAIKK

SEQ ID NO: 3093 - protein, 25 aa, Homo sapiens
MSRINKYLFSNSDSNFSHFSVSNVS

SEQ ID NO: 3094 - protein, 25 aa, Homo sapiens
EILGFNSKGEVHGINGTQWGQTLRM

SEQ ID NO: 3095 - protein, 18 aa, Homo sapiens
KVFISNSTNSSNPCERRS

SEQ ID NO: 3096 - protein, 18 aa, Homo sapiens
RSNLTSFGADQVMDLGRD

SEQ ID NO: 3097 - protein, 23 aa, Homo sapiens
RETALCSLNSSHGIVAFPSRSRS

SEQ ID NO: 3098 - protein, 25 aa, Homo sapiens
RFDGILADAGQTVENMSWMLVCDRP

SEQ ID NO: 3099 - protein, 20 aa, Homo sapiens
RENMSDGDTSATESGDEVPV

SEQ ID NO: 3100 - protein, 28 aa, Homo sapiens
KEMNKSDLNTNNLLFKPPVESHIQKNKK

SEQ ID NO: 3101 - protein, 18 aa, Homo sapiens
RLLSNPLLQTYLPNSTKK

SEQ ID NO: 3102 - protein, 11 aa, Homo sapiens
RYSGVNMTGFR

SEQ ID NO: 3103 - protein, 12 aa, Homo sapiens
RKNSTFPQVQMR

SEQ ID NO: 3104 - protein, 19 aa, Homo sapiens
MSSDNDSYHSDEFLTNSKS

SEQ ID NO: 3105 - protein, 35 aa, Homo sapiens
SPKVTKQNSLNDEGCQSDLEDNVSQGSSDALLLRG

SEQ ID NO: 3106 - protein, 20 aa, Homo sapiens
KLNNTMNACAAIAALERVKI

SEQ ID NO: 3107 - protein, 29 aa, Homo sapiens
RQDNGTLLSLEDLNGGILVDVNTAEHSTV

SEQ ID NO: 3108 - protein, 25 aa, Homo sapiens
KESLIMNHVLNTSQLASSYQYKKKY

SEQ ID NO: 3109 - protein, 16 aa, Homo sapiens
RVKRNQENFSSVLYKE

SEQ ID NO: 3110 - protein, 18 aa, Homo sapiens
KGRGLNAMANETPDFMRA

SEQ ID NO: 3111 - protein, 19 aa, Homo sapiens
VGKMQSTQTTNTSNSTNKS

SEQ ID NO: 3112 - protein, 32 aa, Homo sapiens
RELGGAIDFGAAYVLEQASSHIGNSTQATVRD

SEQ ID NO: 3113 - protein, 37 aa, Homo sapiens
MTATHHFSVDLNASRSLSQVAMDLHEAVSMKLHRVRE

SEQ ID NO: 3114 - protein, 20 aa, Homo sapiens
QTVQRSMANLSVLFGQVVRG

SEQ ID NO: 3115 - protein, 22 aa, Homo sapiens
RVLYMFNQMPLNLTNAVATARQ

SEQ ID NO: 3116 - protein, 33 aa, Homo sapiens
MIHNCSLIASALTISNIQAGSTGNWGCHVQTKR

SEQ ID NO: 3117 - protein, 30 aa, Homo sapiens
KAQAEANATAISNLLPFMEYEVHTQLMNKL

SEQ ID NO: 3118 - protein, 40 aa, Homo sapiens
MPSSTLPGWPGSSGGPVSRPSSLESSRNTSSNSSPLNLKG

SEQ ID NO: 3119 - protein, 18 aa, Homo sapiens
RYLFPEVDMTSTNFTGLS

SEQ ID NO: 3120 - protein, 25 aa, Homo sapiens
KTLTFLAVMLIVLNSTGPAHQPGRG

SEQ ID NO: 3121 - protein, 16 aa, Homo sapiens
MKPVNQTAASNKGLRG

SEQ ID NO: 3122 - protein, 27 aa, Homo sapiens
RQLEDPNGSFSNAEMSELSVAQKPEKL

SEQ ID NO: 3123 - protein, 31 aa, Homo sapiens
KDIKKKNINLQPMWQLLPVEQDTSNVTEMKV

SEQ ID NO: 3124 - protein, 11 aa, Homo sapiens
KNSSNWKLFKE

SEQ ID NO: 3125 - protein, 15 aa, Homo sapiens
KKEDYNETAPMLEQV

SEQ ID NO: 3126 - protein, 16 aa, Homo sapiens
RNSSLLEPQKSGNNET

SEQ ID NO: 3127 - protein, 22 aa, Homo sapiens
KEIAFLSEKISNLTIVQAEIKD

SEQ ID NO: 3128 - protein, 28 aa, Homo sapiens
KTWSNRITEKQDILNNSLTTLSQDITKV

SEQ ID NO: 3129 - protein, 31 aa, Homo sapiens
KMSNITFLNFDPPIEEFHQYYQHIVTTLVKG

SEQ ID NO: 3130 - protein, 30 aa, Homo sapiens
KLGVSSVPSCYLIYPNGSHGLINVVKPLRA

SEQ ID NO: 3131 - protein, 16 aa, Homo sapiens
RAVQPHNGCFNWTSRA

SEQ ID NO: 3132 - protein, 17 aa, Homo sapiens
KKINLNHLLNFTFEPRG

SEQ ID NO: 3133 - protein, 27 aa, Homo sapiens
RGKMADSSGRGAGKPATGPTNSSSAKK

SEQ ID NO: 3134 - protein, 35 aa, Homo sapiens
VTAGILEMRNALGNQSTPAPPTGEVADTPLEPGKV

SEQ ID NO: 3135 - protein, 26 aa, Homo sapiens
KGTQTYSVLEGDPSENYSKYLLSLKE

SEQ ID NO: 3136 - protein, 16 aa, Homo sapiens
RNFSSVAASSGNTTLN

SEQ ID NO: 3137 - protein, 24 aa, Homo sapiens
GCGGGGSYSASSSSAALPVNKSKM

SEQ ID NO: 3138 - protein, 18 aa, Homo sapiens
KMAAANLTFSQEVVWQRG

SEQ ID NO: 3139 - protein, 18 aa, Homo sapiens
VHEEFNPNQANGSYASRR

SEQ ID NO: 3140 - protein, 19 aa, Homo sapiens
KNTNQGFSSANVSEEEERK

SEQ ID NO: 3141 - protein, 18 aa, Homo sapiens
RELSEMRAPPAATNSSKK

SEQ ID NO: 3142 - protein, 23 aa, Homo sapiens
RLYQQFNENNSIGETQARKLSKL

SEQ ID NO: 3143 - protein, 20 aa, Homo sapiens
KLLQAENCDIFQNLSAKQRL

SEQ ID NO: 3144 - protein, 12 aa, Homo sapiens
RNLTGVMNVARP

SEQ ID NO: 3145 - protein, 29 aa, Homo sapiens
MFKMAKNWSAAGNAFCQAAKLHMQLQSKH

SEQ ID NO: 3146 - protein, 12 aa, Homo sapiens
LSMLNGTKVLSD

SEQ ID NO: 3147 - protein, 27 aa, Homo sapiens
KHKGLIEIPSLSEENEINDTEVNVSKK

SEQ ID NO: 3148 - protein, 18 aa, Homo sapiens
KSSISNNYLNLTFPRKRT

SEQ ID NO: 3149 - protein, 22 aa, Homo sapiens
KTDNSLLDQALQNDTVFLNMRG

SEQ ID NO: 3150 - protein, 21 aa, Homo sapiens
KTVVTYHIPQNSSLENVDSRY

SEQ ID NO: 3151 - protein, 27 aa, Homo sapiens
RFEKTNEMLLNFNNLSSARLQQMSERF

SEQ ID NO: 3152 - protein, 10 aa, Homo sapiens
KNNTIAPKKA

SEQ ID NO: 3153 - protein, 23 aa, Homo sapiens
RDSFKVYCNFTAGGSTCVFPDKK

SEQ ID NO: 3154 - protein, 34 aa, Homo sapiens
KTHTNISESHPNATFSAVGEASICEDDWDSGERF

SEQ ID NO: 3155 - protein, 23 aa, Homo sapiens
KSTGKPTLYNVSLVMSDTAGTCY

SEQ ID NO: 3156 - protein, 23 aa, Homo sapiens
RGLTFQQNASSMCGPDQDTAIRV

SEQ ID NO: 3157 - protein, 16 aa, Homo sapiens
RGGNNSFTHEALTLKY

SEQ ID NO: 3158 - protein, 14 aa, Homo sapiens
MPSNSSASISKLRE

SEQ ID NO: 3159 - protein, 15 aa, Homo sapiens
RNLSSLQPPPPGFKR

SEQ ID NO: 3160 - protein, 20 aa, Homo sapiens
KQEMGGIVTEPIRDYNSSRE

SEQ ID NO: 3161 - protein, 24 aa, Homo sapiens
KGSTPRNDPSVSVDYNTTEPAVRW

SEQ ID NO: 3162 - protein, 31 aa, Homo sapiens
RISLSDMPRSPMSTNSSVHTGSDVEQDAEKK

SEQ ID NO: 3163 - protein, 14 aa, Homo sapiens
QSLEDILHQVENKT

SEQ ID NO: 3164 - protein, 15 aa, Homo sapiens
RMLRFIQEVNTTTRS

SEQ ID NO: 3165 - protein, 17 aa, Homo sapiens
REHEKLLMEVCRNCSAV

SEQ ID NO: 3166 - protein, 25 aa, Homo sapiens
RGNYGGGGNYNDFGNYSGQQQSNYG

SEQ ID NO: 3167 - protein, 20 aa, Homo sapiens
RVFFAGFSNATVDNSILLRL

SEQ ID NO: 3168 - protein, 36 aa, Homo sapiens
KKAVSPLLLTTTNSSEGLSMGNYMGLINRIAQKKRL

SEQ ID NO: 3169 - protein, 15 aa, Homo sapiens
KTFANSSYLAQHIRI

SEQ ID NO: 3170 - protein, 34 aa, Homo sapiens
LKGGNNDSWMNPLAKQFSNMGLLSQTEDNPSSKM

SEQ ID NO: 3171 - protein, 25 aa, Homo sapiens
RKGALETDNSNSSAQVSTVGQTSRE

SEQ ID NO: 3172 - protein, 25 aa, Homo sapiens
KMWKNHISSRNTTPLPRPPPGLTNP

SEQ ID NO: 3173 - protein, 29 aa, Homo sapiens
RNLNHTKQRLLEVANYVDQVVNSAGDAHG

SEQ ID NO: 3174 - protein, 24 aa, Homo sapiens
RGERHGDIFMNRTENWIGSQYKKV

SEQ ID NO: 3175 - protein, 18 aa, Homo sapiens
KNDSDLFGLGLEEAGPKE

SEQ ID NO: 3176 - protein, 27 aa, Homo sapiens
SLRENSISPEGAQAIAHALCANSTLKN

SEQ ID NO: 3177 - protein, 16 aa, Homo sapiens
PNHRPTGRGNNISSHH

SEQ ID NO: 3178 - protein, 14 aa, Homo sapiens
KNYNTNITTETSKI

SEQ ID NO: 3179 - protein, 19 aa, Homo sapiens
RDIETFYNTSIEEMPPMLL

SEQ ID NO: 3180 - protein, 26 aa, Homo sapiens
IITEGNGTESLNSVITSMKTGELEKE

SEQ ID NO: 3181 - protein, 27 aa, Homo sapiens
KKNKNSSKPQKNNGSTWANVPLPPPPV

SEQ ID NO: 3182 - protein, 13 aa, Homo sapiens
EYKIWCLGNETRF

SEQ ID NO: 3183 - protein, 30 aa, Homo sapiens
KTVRTTEEAPSAPPQSVTVLTVGSYNSTSI

SEQ ID NO: 3184 - protein, 33 aa, Homo sapiens
RKLGYSSLILDSTGSTLFANCTDDNIYMFNMTG

SEQ ID NO: 3185 - protein, 17 aa, Homo sapiens
KVNAPILTNTTLNVIRL

SEQ ID NO: 3186 - protein, 20 aa, Homo sapiens
YCGTWNNSLSGWVFGGGTKL

SEQ ID NO: 3187 - protein, 30 aa, Homo sapiens
MVYNCTTGSTNPFHWGEVGMILPVFLNVRI

SEQ ID NO: 3188 - protein, 21 aa, Homo sapiens
RGAAAAPGNWSSRQRPAHPRT

SEQ ID NO: 3189 - protein, 31 aa, Homo sapiens
RKALPMEFEAYINASGEHGIVVFSLGSMVSE

SEQ ID NO: 3190 - protein, 11 aa, Homo sapiens
KNNSDISSTRG

SEQ ID NO: 3191 - protein, 23 aa, Homo sapiens
RGLTFQQNASSMCVPDQDTAIRV

SEQ ID NO: 3192 - protein, 34 aa, Homo sapiens; identical to SEQ ID NO: 1485

SEQ ID NO: 3193 - protein, 22 aa, Homo sapiens
RIYPGPTRLANSTIKDESPPRY

SEQ ID NO: 3194 - protein, 23 aa, Homo sapiens
FNQIMHAFSVAPFDQNLSIDGKI

SEQ ID NO: 3195 - protein, 25 aa, Homo sapiens
KGETWATPNCSEATCEGNNVISLSP

SEQ ID NO: 3196 - protein, 24 aa, Homo sapiens
MRQNNNITEFVLLGFSQDLDVQKA

SEQ ID NO: 3197 - protein, 25 aa, Homo sapiens
GNIINMSSVASSVKGGSVSFRGLRC

SEQ ID NO: 3198 - protein, 26 aa, Homo sapiens
KADILLDCLLDEDPENQTLRKDYEKT

SEQ ID NO: 3199 - protein, 26 aa, Homo sapiens
KGPIGPGEPLELLCNVSGALPPAGRH

SEQ ID NO: 3200 - protein, 26 aa, Homo sapiens
MWSHMQPHLFHNQSVLAEQMALNKKF

SEQ ID NO: 3201 - protein, 15 aa, Homo sapiens
KENQSIRAFNSEHKI

SEQ ID NO: 3202 - protein, 13 aa, Homo sapiens
REWNGTYHCIFRY

SEQ ID NO: 3203 - protein, 25 aa, Homo sapiens
MKVMCDNNPVSLNCCSQGNVNWSKV

SEQ ID NO: 3204 - protein, 21 aa, Homo sapiens
KVLQQQWTNQSSQLLHSVERF

SEQ ID NO: 3205 - protein, 23 aa, Homo sapiens
KNLPFLEHLELIGSNFSSAMPRN

SEQ ID NO: 3206 - protein, 23 aa, Homo sapiens
MSHFPDRGSENGTPMDVKAGVRV

SEQ ID NO: 3207 - protein, 33 aa, Homo sapiens
RTAADNFSTQYVLDGSGHILSQKPSHLGQGKKV

SEQ ID NO: 3208 - protein, 21 aa, Homo sapiens
KWQSAIQDFRSNATALCHIRN

SEQ ID NO: 3209 - protein, 33 aa, Homo sapiens
RRAFMLEPEGMSPMEPAGVSPMPGTQNDTGRTE

SEQ ID NO: 3210 - protein, 27 aa, Homo sapiens
RRARHDSPDPSPPRRPQHNSSGDCQKA

SEQ ID NO: 3211 - protein, 29 aa, Homo sapiens
TVTPVSPSFAHNPKRHNSASVENVSLRKS

SEQ ID NO: 3212 - protein, 22 aa, Homo sapiens
RRRKNMSEFLGEASIPGQEPPT

SEQ ID NO: 3213 - protein, 20 aa, Homo sapiens
MEITWTPMNATSAFGPNLRY

SEQ ID NO: 3214 - protein, 33 aa, Homo sapiens
KRQPATLTVDWFNATSSKVNATFSEASPVELKL

SEQ ID NO: 3215 - protein, 20 aa, Homo sapiens
KSNISPNFNFMGQLLDFERT

SEQ ID NO: 3216 - protein, 24 aa, Homo sapiens
MENPQEPDAPIVTFFPLINDTFRK

SEQ ID NO: 3217 - protein, 14 aa, Homo sapiens
KNLSGPDDLLIDKN

SEQ ID NO: 3218 - protein, 18 aa, Homo sapiens
KPLGPLQTLMENLSSNRF

SEQ ID NO: 3219 - protein, 16 aa, Homo sapiens
KCQAHSQNVTFVLRKV

SEQ ID NO: 3220 - protein, 13 aa, Homo sapiens
KNLSINNDLNLRY

SEQ ID NO: 3221 - protein, 34 aa, Homo sapiens
RSLCCGDISQSAVLFLCQGTLAMLDWQNGSMGRS

SEQ ID NO: 3222 - protein, 19 aa, Homo sapiens
MLQDDNTSAGLHFMASVKK

SEQ ID NO: 3223 - protein, 16 aa, Homo sapiens
KANEQVVQSLNQTYKM

SEQ ID NO: 3224 - protein, 35 aa, Homo sapiens
NPDASYNLGVLHLDGIFPGVPGRNQTLAGEIFHKA

SEQ ID NO: 3225 - protein, 32 aa, Homo sapiens
RLPASLAEYTVTQLRPNATYSVCVMPLGPGRV

SEQ ID NO: 3226 - protein, 40 aa, Homo sapiens
RIAQLRPEDLAGLAALQELDVSNLSLQALPGDLSGLFPRL

SEQ ID NO: 3227 - protein, 12 aa, Homo sapiens
RLHEITNETFRG

SEQ ID NO: 3228 - protein, 30 aa, Homo sapiens
KAVEVATVVIQPTVLRAAVPKNVSVAEGKE

SEQ ID NO: 3229 - protein, 18 aa, Homo sapiens
PSRPSNSNISKGESRPKW

SEQ ID NO: 3230 - protein, 25 aa, Homo sapiens
RVNRSVHEWAGGGGGGGGATYVFKM

SEQ ID NO: 3231 - protein, 26 aa, Homo sapiens
KNKIARLGNGSQDLNHGVDNENGGRR

SEQ ID NO: 3232 - protein, 29 aa, Homo sapiens
KIARLGNGSQDLNHGVDNENGGRRGPNRT

SEQ ID NO: 3233 - protein, 37 aa, Homo sapiens
ADKASDTSSETVFGKRGHVLGNGSQVTQAANSGCSKA

SEQ ID NO: 3234 - protein, 22 aa, Homo sapiens
RRAEMSQTNFTPDTLAQNEGKA

SEQ ID NO: 3235 - protein, 19 aa, Homo sapiens
KGRTFNLTAGNDDSIVMKA

SEQ ID NO: 3236 - protein, 14 aa, Homo sapiens
LNRSDSDSSTLAKK

SEQ ID NO: 3237 - protein, 31 aa, Homo sapiens
MLNGTTLEAAMLFHGISGGHIQGIMEEMERR

SEQ ID NO: 3238 - protein, 11 aa, Homo sapiens
RENFTQTLPKM

SEQ ID NO: 3239 - protein, 26 aa, Homo sapiens
RVAGAPAPWAAAHGGAMMDVNSSGRP

SEQ ID NO: 3240 - protein, 26 aa, Homo sapiens
KHYQTVFLMRSNSTLNKHNENYKQKK

SEQ ID NO: 3241 - protein, 20 aa, Homo sapiens
PLLPKSSTIEEEENMSGHKC

SEQ ID NO: 3242 - protein, 25 aa, Homo sapiens
QNSTQDSGPQESEGSAGNSLTVAKD

SEQ ID NO: 3243 - protein, 33 aa, Homo sapiens
KGDIGIVPLGLVETAILKPSMWSTFAPVNTTTE

SEQ ID NO: 3244 - protein, 19 aa, Homo sapiens
KGQSVSSPPNDCNISPARV

SEQ ID NO: 3245 - protein, 18 aa, Homo sapiens
KSGTASVVCLLNNFYPRE

SEQ ID NO: 3246 - protein, 19 aa, Homo sapiens
VSVLTVLHQNWLDGKEYKC

SEQ ID NO: 3247 - protein, 15 aa, Homo sapiens
KNGREVNGCSGVNRY

SEQ ID NO: 3248 - protein, 15 aa, Homo sapiens
KFDPSTKIYEISNRW

SEQ ID NO: 3249 - protein, 24 aa, Homo sapiens
RDMRMGGGGAMNMGDPYGSGGQKF

SEQ ID NO: 3250 - protein, 27 aa, Homo sapiens
RLLPPNTVNLPSKVRAFTFPSEVPSKA

SEQ ID NO: 3251 - protein, 19 aa, Homo sapiens
RRVTVNTAYGSNGVSVLRI

SEQ ID NO: 3252 - protein, 13 aa, Homo sapiens
RNANFKFTDHLKY

SEQ ID NO: 3253 - protein, 22 aa, Homo sapiens
KSPVGVQPILNEHTFCAGMSKY

SEQ ID NO: 3254 - protein, 22 aa, Homo sapiens
KLRTEGDGVYTLNNEKQWINKA

SEQ ID NO: 3255 - protein, 19 aa, Homo sapiens
KDLLRNCCNTENPPGCYRY

SEQ ID NO: 3256 - protein, 17 aa, Homo sapiens
RLAARLEALKENGGARL

SEQ ID NO: 3257 - protein, 26 aa, Homo sapiens
KLREQLGPVTQEFWDNLEKETEGLRQ

SEQ ID NO: 3258 - protein, 16 aa, Homo sapiens
KLLDNWDSVTSTFSKL

SEQ ID NO: 3259 - protein, 19 aa, Homo sapiens
REYSGTIASEANTYLNSKS

SEQ ID NO: 3260 - protein, 28 aa, Homo sapiens
QFNNNEYSQDLDAYNTKDKIGVELTGRT

SEQ ID NO: 3261 - protein, 25 aa, Homo sapiens
KSNTVASLHTEKNTLELSNGVIVKI

SEQ ID NO: 3262 - protein, 22 aa, Homo sapiens
RAYSLFSYNTQGRDNELLVYKE

SEQ ID NO: 3263 - protein, 14 aa, Homo sapiens
KTNQVNSGGVLLRL

SEQ ID NO: 3264 - protein, 14 aa, Homo sapiens
RAIEDYINEFSVRK

SEQ ID NO: 3265 - protein, 13 aa, Homo sapiens
KTSNFNAAISLKF

SEQ ID NO: 3266 - protein, 28 aa, Homo sapiens
KLQELHLSSNGLESLSPEFLRPVPQLRV

SEQ ID NO: 3267 - protein, 24 aa, Homo sapiens
RYTIAALLSPYSYSTTAVVTNPKE

SEQ ID NO: 3268 - protein, 15 aa, Homo sapiens
RGSPAINVAVHVFRK

SEQ ID NO: 3269 - protein, 26 aa, Homo sapiens
RSMGGKEDLIWELLNQAQEHFGKDKS

SEQ ID NO: 3270 - protein, 21 aa, Homo sapiens
RSAGWNIPIGLLYCDLPEPRK

SEQ ID NO: 3271 - protein, 15 aa, Homo sapiens
RNTYEKYLGEEYVKA

SEQ ID NO: 3272 - protein, 15 aa, Homo sapiens
RLKCDEWSVNSVGKI

SEQ ID NO: 3273 - protein, 15 aa, Homo sapiens
RKPVEEYANCHLARA

SEQ ID NO: 3274 - protein, 15 aa, Homo sapiens
KSASDLTWDNLKGKK

SEQ ID NO: 3275 - protein, 28 aa, Homo sapiens
KLCMGSGLNLCEPNNKEGYYGYTGAFRC

SEQ ID NO: 3276 - protein, 28 aa, Homo sapiens
KLCMGSGLNLCEPNNKEGYYGYTGAFRC

SEQ ID NO: 3277 - protein, 21 aa, Homo sapiens
KINHCRFDEFFSEGCAPGSKK

SEQ ID NO: 3278 - protein, 23 aa, Homo sapiens
KIMNGEADAMSLDGGFVYIAGKC

SEQ ID NO: 3279 - protein, 20 aa, Homo sapiens
KGDVAFVKHQTVPQNTGGKN

SEQ ID NO: 3280 - protein, 13 aa, Homo sapiens
RYYCFQGNQFLRF

SEQ ID NO: 3281 - protein, 15 aa, Homo sapiens
RWKNFPSPVDAAFRQ

SEQ ID NO: 3282 - protein, 25 aa, Homo sapiens
LPPTSAHGNVAEGETKPDPDVTERC

SEQ ID NO: 3283 - protein, 32 aa, Homo sapiens
KSLGPNSCSANGPGLYLIHGPNLYCYSDVEKL

SEQ ID NO: 3284 - protein, 13 aa, Homo sapiens
RSSGSLLNNAIKG

SEQ ID NO: 3285 - protein, 15 aa, Homo sapiens
RNQGNTWLTAFVLKT

SEQ ID NO: 3286 - protein, 11 aa, Homo sapiens
KATVLNYLPKC

SEQ ID NO: 3287 - protein, 12 aa, Homo sapiens
KMNTVIAALSRD

SEQ ID NO: 3288 - protein, 36 aa, Homo sapiens
RFATTFYQHLADSKNDNDNIFLSPLSISTAFAMTKL

SEQ ID NO: 3289 - protein, 14 aa, Homo sapiens
REVPLNTIIFMGRV

SEQ ID NO: 3290 - protein, 14 aa, Homo sapiens
QPLDFKENAEQSRA

SEQ ID NO: 3291 - protein, 16 aa, Homo sapiens
RAAMVGMLANFLGFRI

SEQ ID NO: 3292 - protein, 23 aa, Homo sapiens
ASDLDKVEGLTFQQNSLNWMKKL

SEQ ID NO: 3293 - protein, 16 aa, Homo sapiens
RTEVSSNHVLIYLDKV

SEQ ID NO: 3294 - protein, 24 aa, Homo sapiens
RSLFTDLEAENDVLHCVAFAVPKS

SEQ ID NO: 3295 - protein, 13 aa, Homo sapiens
RSASNMAIVDVKM

SEQ ID NO: 3296 - protein, 33 aa, Homo sapiens
RHNVYINGITYTPVSSTNEKDMYSFLEDMGLKA

SEQ ID NO: 3297 - protein, 24 aa, Homo sapiens
KSSSNEEVMFLTVQVKGPTQEFKK

SEQ ID NO: 3298 - protein, 15 aa, Homo sapiens
KSKAIGYLNTGYQRQ

SEQ ID NO: 3299 - protein, 25 aa, Homo sapiens
KQQNAQGGFSSTQDTVVALHALSKY

SEQ ID NO: 3300 - protein, 14 aa, Homo sapiens
KNEDSLVFVQTDKS

SEQ ID NO: 3301 - protein, 14 aa, Homo sapiens
KGVPIPNKVIFIRG

SEQ ID NO: 3302 - protein, 18 aa, Homo sapiens
KFSGQLNSHGCFYQQVKT

SEQ ID NO: 3303 - protein, 28 aa, Homo sapiens
KFRVVSMDENFHPLNELIPLVYIQDPKG

SEQ ID NO: 3304 - protein, 14 aa, Homo sapiens
KEQAPHCICANGRQ

SEQ ID NO: 3305 - protein, 17 aa, Homo sapiens
KALLAYAFALAGNQDKR

SEQ ID NO: 3306 - protein, 13 aa, Homo sapiens
KAIGYLNTGYQRQ

SEQ ID NO: 3307 - protein, 24 aa, Homo sapiens
RIASFSQNCDIYPGKDFVQPPTKI

SEQ ID NO: 3308 - protein, 21 aa, Homo sapiens
RDIPTNSPELEETLTHTITKL

SEQ ID NO: 3309 - protein, 15 aa, Homo sapiens
RVENSYGQERRCHLM

SEQ ID NO: 3310 - protein, 17 aa, Homo sapiens
RTVMVNIENPEGIPVKQ

SEQ ID NO: 3311 - protein, 25 aa, Homo sapiens
RTMQALPYSTVGNSNNYLHLSVLRT

SEQ ID NO: 3312 - protein, 25 aa, Homo sapiens
RTMQALPYSTVGNSNNYLHLSVLRT

SEQ ID NO: 3313 - protein, 15 aa, Homo sapiens
RAVLYNYRQNQELKV

SEQ ID NO: 3314 - protein, 18 aa, Homo sapiens
KVHQYFNVELIQPGAVKV

SEQ ID NO: 3315 - protein, 16 aa, Homo sapiens
KAGDFLEANYMNLQRS

SEQ ID NO: 3316 - protein, 18 aa, Homo sapiens
VQRLAHGLHKVNTLALKY

SEQ ID NO: 3317 - protein, 25 aa, Homo sapiens
MKLMIVGNTGSGKTTLLQQLMKTKK

SEQ ID NO: 3318 - protein, 32 aa, Homo sapiens
KIPVVPHNECSEVMSNMVSENMLCAGILGDRQ

SEQ ID NO: 3319 - protein, 28 aa, Homo sapiens
HLETPDFQLFKNGVAQEPVHLDSPAIKH

SEQ ID NO: 3320 - protein, 32 aa, Homo sapiens
KVFDEFKPLVEEPQNLIKQNCELFEQLGEYKF

SEQ ID NO: 3321 - protein, 19 aa, Homo sapiens
KVFDEFKPLVEEPQNLIKQ

SEQ ID NO: 3322 - protein, 12 aa, Homo sapiens
KLVNEVTEFAKT

SEQ ID NO: 3323 - protein, 21 aa, Homo sapiens
KKVPQVSTPTLVEVSRNLGKV

SEQ ID NO: 3324 - protein, 10 aa, Homo sapiens
KFQNALLVRY

SEQ ID NO: 3325 - protein, 14 aa, Homo sapiens
RYNRQIGEFIVTRA

SEQ ID NO: 3326 - protein, 24 aa, Homo sapiens
KDKQIITFFSPLTILVGPNGAGKT

SEQ ID NO: 3327 - protein, 31 aa, Homo sapiens
KGIETGSEDLEILPNGLAFISSGLKYPGIKS

SEQ ID NO: 3328 - protein, 13 aa, Homo sapiens
KNTLYLQMNSLRA

SEQ ID NO: 3329 - protein, 15 aa, Homo sapiens
ERANSHIFLYGDLRS

SEQ ID NO: 3330 - protein, 22 aa, Homo sapiens
MVTFSNTLPRANTPSVEDPVRR

SEQ ID NO: 3331 - protein, 26 aa, Homo sapiens
RVQSWKGSLVQASEANLQAAQDFVRG

SEQ ID NO: 3332 - protein, 31 aa, Homo sapiens
RGRFPLYNLGFGHNVDFNFLEVMSMENNGRA

SEQ ID NO: 3333 - protein, 21 aa, Homo sapiens
KGSLVQASEANLQAAQDFVRG

SEQ ID NO: 3334 - protein, 30 aa, Homo sapiens
RAISGGSIQIENGYFVHYFAPEGLTTMPKN

SEQ ID NO: 3335 - protein, 17 aa, Homo sapiens
AEKNGIDIYSLTVDSRV

SEQ ID NO: 3336 - protein, 18 aa, Homo sapiens
RYSAWAESVTNLPQVIKQ

SEQ ID NO: 3337 - protein, 16 aa, Homo sapiens
RVCPFAGILENGAVRY

SEQ ID NO: 3338 - protein, 25 aa, Homo sapiens
KCPFPSRPDNGFVNYPAKPTLYYKD

SEQ ID NO: 3339 - protein, 25 aa, Homo sapiens
KSSTLKPTIEALPNVLPLNEDVNKQ

SEQ ID NO: 3340 - protein, 26 aa, Homo sapiens
RTLNQPDSQLQLTTGNGLFLSEGLKL

SEQ ID NO: 3341 - protein, 17 aa, Homo sapiens
NKITPNLAEFAFSLYRQ

SEQ ID NO: 3342 - protein, 29 aa, Homo sapiens
NATAIFFLPDEGKLQHLENELTHDIITKF

SEQ ID NO: 3343 - protein, 22 aa, Homo sapiens
LPDEGKLQHLENELTHDIITKF

SEQ ID NO: 3344 - protein, 31 aa, Homo sapiens
KTDTSHHDQDHPTFNKITPNLAEFAFSLYRQ

SEQ ID NO: 3345 - protein, 15 aa, Homo sapiens
KQINDYVEKGTQGKI

SEQ ID NO: 3346 - protein, 17 aa, Homo sapiens
KLQHLENELTHDIITKF

SEQ ID NO: 3347 - protein, 16 aa, Homo sapiens
KITPNLAEFAFSLYRQ

SEQ ID NO: 3348 - protein, 19 aa, Homo sapiens
KELDRDTVFALVNYIFFKG

SEQ ID NO: 3349 - protein, 25 aa, Homo sapiens
IFFLPDEGKLQHLENELTHDIITKF

SEQ ID NO: 3350 - protein, 28 aa, Homo sapiens
ATAIFFLPDEGKLQHLENELTHDIITKF

SEQ ID NO: 3351 - protein, 17 aa, Homo sapiens
RKLWAYLTINQLLAERS

SEQ ID NO: 3352 - protein, 21 aa, Homo sapiens
RGFQHLLHTLNLPGHGLETRV

SEQ ID NO: 3353 - protein, 13 aa, Homo sapiens
KIAPANADFAFRF

SEQ ID NO: 3354 - protein, 17 aa, Homo sapiens
VVSVLTVLHQDWLNGKE

SEQ ID NO: 3355 - protein, 12 aa, Homo sapiens
KNQVSLTCLVKG

SEQ ID NO: 3356 - protein, 24 aa, Homo sapiens
KGFYPSDIAVEWESNGQPENNYKT

SEQ ID NO: 3357 - protein, 16 aa, Homo sapiens
KFNWYVDGVEVHNAKT

SEQ ID NO: 3358 - protein, 13 aa, Homo sapiens
KNSLYLQMNSLRA

SEQ ID NO: 3359 - protein, 21 aa, Homo sapiens
RGLESQTKLVNGQSHISLSKA

SEQ ID NO: 3360 - protein, 23 aa, Homo sapiens
KAEFQDALEKLNMGITDLQGLRL

SEQ ID NO: 3361 - protein, 21 aa, Homo sapiens
RFFESFGDLSTPDAVMGNPKV

SEQ ID NO: 3362 - protein, 17 aa, Homo sapiens
RMKGLIDEVNQDFTNRI

SEQ ID NO: 3363 - protein, 22 aa, Homo sapiens
VFSNGADLSGVTEEAPLKLSKA

SEQ ID NO: 3364 - protein, 23 aa, Homo sapiens
KVFSNGADLSGVTEEAPLKLSKA

SEQ ID NO: 3365 - protein, 33 aa, Homo sapiens
KSVLGQLGITKVFSNGADLSGVTEEAPLKLSKA

SEQ ID NO: 3366 - protein, 17 aa, Homo sapiens
KFNKPFVFLMIEQNTKS

SEQ ID NO: 3367 - protein, 17 aa, Homo sapiens
RDNSKNSLYLQMNSLRA

SEQ ID NO: 3368 - protein, 24 aa, Homo sapiens
KHFLMENINNENKGSINLKRKHIT

SEQ ID NO: 3369 - protein, 13 aa, Homo sapiens
KDSLYLQMNSLRV

SEQ ID NO: 3370 - protein, 24 aa, Homo sapiens
RLSLLEEPGNGTFTVILNQLTSRD

SEQ ID NO: 3371 - protein, 11 aa, Homo sapiens
REQQFNSTFRV

SEQ ID NO: 3372 - protein, 11 aa, Homo sapiens
REEQFNSTYRV

SEQ ID NO: 3373 - protein, 15 aa, Homo sapiens
RLAGKPTHVNVSVVM

SEQ ID NO: 3374 - protein, 25 aa, Homo sapiens
VQGFFPQEPLSVTWSESGQNVTARN

SEQ ID NO: 3375 - protein, 15 aa, Homo sapiens
KIVVYNQPYINYSRT

SEQ ID NO: 3376 - protein, 17 aa, Homo sapiens
RGKIVVYNQPYINYSRT

SEQ ID NO: 3377 - protein, 15 aa, Homo sapiens
RLQNNENNISCVERG

SEQ ID NO: 3378 - protein, 28 aa, Homo sapiens
RADGTVNQIEGEATPVNLTEPAKLEVKF

SEQ ID NO: 3379 - protein, 15 aa, Homo sapiens
RSCPACPGSNITIRN

SEQ ID NO: 3380 - protein, 18 aa, Homo sapiens
ANAPYNQTLTGYNDYIKM

SEQ ID NO: 3381 - protein, 12 aa, Homo sapiens
RVQPFNVTQGKY

SEQ ID NO: 3382 - protein, 19 aa, Homo sapiens
RTLYRFENQTGFPPPDSRF

SEQ ID NO: 3383 - protein, 11 aa, Homo sapiens
RNKSVILLGRH

SEQ ID NO: 3384 - protein, 27 aa, Homo sapiens
RALAYGEKNLTFEGPLPEKIELLAHKG

SEQ ID NO: 3385 - protein, 15 aa, Homo sapiens
KYYKGSLSYLNVTRK

SEQ ID NO: 3386 - protein, 18 aa, Homo sapiens
KTAVNCSSDFDACLITKA

SEQ ID NO: 3387 - protein, 16 aa, Homo sapiens
SLQCYNCPNPTADCKT

SEQ ID NO: 3388 - protein, 19 aa, Homo sapiens
RNLEKNSTKQEILAALEKG

SEQ ID NO: 3389 - protein, 19 aa, Homo sapiens
KYSVANDTGFVDIPKQEKA

SEQ ID NO: 3390 - protein, 21 aa, Homo sapiens
KSVVAPATDGGLNLTSTFLRK

SEQ ID NO: 3391 - protein, 22 aa, Homo sapiens
KSVVAPATDGGLNLTSTFLRKN

SEQ ID NO: 3392 - protein, 27 aa, Homo sapiens
KAQVSNEDCLQVENCTQLGEQCWTARI

SEQ ID NO: 3393 - protein, 14 aa, Homo sapiens
KALKQYNSTGDYRS

SEQ ID NO: 3394 - protein, 24 aa, Homo sapiens
KILAPAYFILGGNQSGEGCVITRD

SEQ ID NO: 3395 - protein, 15 aa, Homo sapiens
TAASEETLFNASQRI

SEQ ID NO: 3396 - protein, 17 aa, Homo sapiens
RSFMVNWTHAPGNVEKY

SEQ ID NO: 3397 - protein, 23 aa, Homo sapiens
KIIISPEENVTLTCTAENQLERT

SEQ ID NO: 3398 - protein, 18 aa, Homo sapiens
KEHEGAIYPDNTTDFQRA

SEQ ID NO: 3399 - protein, 19 aa, Homo sapiens
KELHHLQEQNVSNAFLDKG

SEQ ID NO: 3400 - protein, 18 aa, Homo sapiens
KVVLHPNYSQVDIGLIKL

SEQ ID NO: 3401 - protein, 23 aa, Homo sapiens
RSPYYNVSDEISFHCYDGYTLRG

SEQ ID NO: 3402 - protein, 19 aa, Homo sapiens
RNNQIDHIDEKAFENVTDL

SEQ ID NO: 3403 - protein, 25 aa, Homo sapiens
KVDKDLQSLEDILHQVENKTSEVKQ

SEQ ID NO: 3404 - protein, 24 aa, Homo sapiens
RVNLTTNTIAVTQTLPNAAYNNRF

SEQ ID NO: 3405 - protein, 22 aa, Homo sapiens
KLDAPTNLQFVNETDSTVLVRW

SEQ ID NO: 3406 - protein, 17 aa, Homo sapiens
RQDQCIYNTTYLNVQRE

SEQ ID NO: 3407 - protein, 24 aa, Homo sapiens
KAALAAFNAQNNGSNFQLEEISRA

SEQ ID NO: 3408 - protein, 17 aa, Homo sapiens
KVCQDCPLLAPLNDTRV

SEQ ID NO: 3409 - protein, 23 aa, Homo sapiens
RQQQHLFGSNVTDCSGNFCLFRS

SEQ ID NO: 3410 - protein, 15 aa, Homo sapiens
RSWPAVGNCSSALRW

SEQ ID NO: 3411 - protein, 17 aa, Homo sapiens
KALPQPQNVTSLLGCTH

SEQ ID NO: 3412 - protein, 16 aa, Homo sapiens
RVDLEDFENNTAYAKY

SEQ ID NO: 3413 - protein, 23 aa, Homo sapiens
RLDCRHENTSSSPIQYEFSLTRE

SEQ ID NO: 3414 - protein, 15 aa, Homo sapiens
RALGFENATQALGRA

SEQ ID NO: 3415 - protein, 13 aa, Homo sapiens
RDAGVVCTNETRS

SEQ ID NO: 3416 - protein, 14 aa, Homo sapiens
KGLNLTEDTYKPRI

SEQ ID NO: 3417 - protein, 16 aa, Homo sapiens
RTVIRPFYLTNSSGVD

SEQ ID NO: 3418 - protein, 16 aa, Homo sapiens
RYKGLNLTEDTYKPRI

SEQ ID NO: 3419 - protein, 24 aa, Homo sapiens
RSLTQGSLIVGDLAPVNGTSQGKF

SEQ ID NO: 3420 - protein, 27 aa, Homo sapiens
RIQGEEIVFHDLNLTAHGISHCPTCRD

SEQ ID NO: 3421 - protein, 23 aa, Homo sapiens
RNLHQSNTSRAELLVTEAPSKPI

SEQ ID NO: 3422 - protein, 25 aa, Homo sapiens
RVAQQDSGQYICNATSPAGHAEATI

SEQ ID NO: 3423 - protein, 16 aa, Homo sapiens
RAQLLQGLGFNLTERS

SEQ ID NO: 3424 - protein, 23 aa, Homo sapiens
RAKLDAFFALEGFPTEPNSSSRA

SEQ ID NO: 3425 - protein, 24 aa, Homo sapiens
KSAEGTFFINKTEIEDFPRFPHRG

SEQ ID NO: 3426 - protein, 13 aa, Homo sapiens
RIHQNITYQVCRH

SEQ ID NO: 3427 - protein, 20 aa, Homo sapiens
KIPCSQPPQIEHGTINSSRS

SEQ ID NO: 3428 - protein, 33 aa, Homo sapiens
RCINGTCYCEEGFTGEDCGKPTCPHACHTQGRC

SEQ ID NO: 3429 - protein, 35 aa, Homo sapiens
KSLGNVNFTVSAEALESQELCGTEVPSVPEHGRKD

SEQ ID NO: 3430 - protein, 15 aa, Homo sapiens
RSHNRSEEFLIAGKL

SEQ ID NO: 3431 - protein, 19 aa, Homo sapiens
RAKFVGTPEVNQTTLYQRY

SEQ ID NO: 3432 - protein, 17 aa, Homo sapiens
KFVGTPEVNQTTLYQRY

SEQ ID NO: 3433 - protein, 21 aa, Homo sapiens
KFVGTPEVNQTTLYQRYEIKM

SEQ ID NO: 3434 - protein, 14 aa, Homo sapiens
KLNAENNATFYFKI

SEQ ID NO: 3435 - protein, 18 aa, Homo sapiens
KKLRLPDTGLYNMTDSGT

SEQ ID NO: 3436 - protein, 16 aa, Homo sapiens
RLHNQLLPNVTTVERN

SEQ ID NO: 3437 - protein, 14 aa, Homo sapiens
KVISLLPKENKTRG

SEQ ID NO: 3438 - protein, 23 aa, Homo sapiens
KTVLTPATNHMGNVTFTIPANRE

SEQ ID NO: 3439 - protein, 11 aa, Homo sapiens
RFGCEIENNRS

SEQ ID NO: 3440 - protein, 20 aa, Homo sapiens
KDIVEYYNDSNGSHVLQGRF

SEQ ID NO: 3441 - protein, 18 aa, Homo sapiens
RFGCEIENNRSSGAFWKY

SEQ ID NO: 3442 - protein, 17 aa, Homo sapiens
VANFSQIETLTSVFQKK

SEQ ID NO: 3443 - protein, 11 aa, Homo sapiens
REEQFNSTFRV

SEQ ID NO: 3444 - protein, 18 aa, Homo sapiens
RSDLNPANGSYPFKALRQ

SEQ ID NO: 3445 - protein, 19 aa, Homo sapiens
RLQQDVLQFQKNQTNLERK

SEQ ID NO: 3446 - protein, 16 aa, Homo sapiens
RKFDVNQLQNTTIKRI

SEQ ID NO: 3447 - protein, 21 aa, Homo sapiens
RIIVPLNNRENISDPTSPLRT

SEQ ID NO: 3448 - protein, 20 aa, Homo sapiens
RQQMENYPKNNHTASILDRM

SEQ ID NO: 3449 - protein, 24 aa, Homo sapiens
KNRVPDSCCINVTVGCGINFNEKA

SEQ ID NO: 3450 - protein, 23 aa, Homo sapiens
RTATESFPHPGFNNSLPNKDHRN

SEQ ID NO: 3451 - protein, 13 aa, Homo sapiens
KAEFNITLIHPKD

SEQ ID NO: 3452 - protein, 24 aa, Homo sapiens
KGPSTPLPEDPNWNVTEFHTTPKM

SEQ ID NO: 3453 - protein, 13 aa, Homo sapiens
KKLNYTLSQGHRV

SEQ ID NO: 3454 - protein, 13 aa, Homo sapiens
VLLNLNVTGYYRV

SEQ ID NO: 3455 - protein, 14 aa, Homo sapiens
RNATLVNEADKLRA

SEQ ID NO: 3456 - protein, 16 aa, Homo sapiens
VTLALNNTLFLIEERQ

SEQ ID NO: 3457 - protein, 13 aa, Homo sapiens
RSCINESAIDSRG

SEQ ID NO: 3458 - protein, 23 aa, Homo sapiens
RAQQLLANSTALEEAMLQEQQRL

SEQ ID NO: 3459 - protein, 21 aa, Homo sapiens
RKQELSRDNATLQATLHAARD

SEQ ID NO: 3460 - protein, 16 aa, Homo sapiens
GLANASAPSGEQLLRT

SEQ ID NO: 3461 - protein, 18 aa, Homo sapiens
RLHRLNASIADLQSQLRS

SEQ ID NO: 3462 - protein, 21 aa, Homo sapiens
KRLNTTGVSAGCTADLLVGRA

SEQ ID NO: 3463 - protein, 10 aa, Homo sapiens
RKFLNESYKH

SEQ ID NO: 3464 - protein, 16 aa, Homo sapiens
KFLNESYKHEQVYIRS

SEQ ID NO: 3465 - protein, 13 aa, Homo sapiens
RKFLNESYKHEQV

SEQ ID NO: 3466 - protein, 17 aa, Homo sapiens
RKFLNESYKHEQVYIRS

SEQ ID NO: 3467 - protein, 16 aa, Homo sapiens
RLANLTQGEDQYYLRV

SEQ ID NO: 3468 - protein, 23 aa, Homo sapiens
KVGQLQLSHNLSLVILVPQNLKH

SEQ ID NO: 3469 - protein, 15 aa, Homo sapiens
KGSQWSDIEEFCNRS

SEQ ID NO: 3470 - protein, 12 aa, Homo sapiens
RLYLDHNNLTRM

SEQ ID NO: 3471 - protein, 17 aa, Homo sapiens
RGVFITNETGQPLIGKV

SEQ ID NO: 3472 - protein, 32 aa, Homo sapiens
KVTVLGVATAPQQVLSNGVPVSNFTYSPDTKA

SEQ ID NO: 3473 - protein, 22 aa, Homo sapiens
RALAGLVYNASGSEHCYDIYRL

SEQ ID NO: 3474 - protein, 11 aa, Homo sapiens
RFGNKTFPQRF

SEQ ID NO: 3475 - protein, 15 aa, Homo sapiens
KNLFLNHSENATAKD

SEQ ID NO: 3476 - protein, 26 aa, Homo sapiens
KMVSHHNLTTGATLINEQWLLTTAKN

SEQ ID NO: 3477 - protein, 25 aa, Homo sapiens
RCAPNFWNLTSGHGCQPCACHPSRA

SEQ ID NO: 3478 - protein, 19 aa, Homo sapiens
RTLAGENQTAFEIEELNRK

SEQ ID NO: 3479 - protein, 21 aa, Homo sapiens
REGFVGNRCDQCEENYFYNRS

SEQ ID NO: 3480 - protein, 20 aa, Homo sapiens
RIASAVQKNATSTKAEAERT

SEQ ID NO: 3481 - protein, 17 aa, Homo sapiens
RKIPAINQTITEANEKT

SEQ ID NO: 3482 - protein, 11 aa, Homo sapiens
KLLNNLTSIKI

SEQ ID NO: 3483 - protein, 16 aa, Homo sapiens
KQVLSYGQNLSFSFRV

SEQ ID NO: 3484 - protein, 17 aa, Homo sapiens
KTANDTSTEAYNLLLRT

SEQ ID NO: 3485 - protein, 15 aa, Homo sapiens
RVYKPSAGNNSLYRD

SEQ ID NO: 3486 - protein, 13 aa, Homo sapiens
KLGNWSAMPSCKA

SEQ ID NO: 3487 - protein, 21 aa, Homo sapiens
RTAGWNIPMGLLFNQTGSCKF

SEQ ID NO: 3488 - protein, 22 aa, Homo sapiens
KFGRNGSDCPDKFCLFQSETKN

SEQ ID NO: 3489 - protein, 32 aa, Homo sapiens
RPQPPAEEELCSGKPFDAFTDLKNGSLFAFRG

SEQ ID NO: 3490 - protein, 12 aa, Homo sapiens
KSYNVTSVLFRK

SEQ ID NO: 3491 - protein, 19 aa, Homo sapiens
KGQSYSVNVTFTSNIQSKS

SEQ ID NO: 3492 - protein, 16 aa, Homo sapiens
KAFNSTLPTMAQMEKA

SEQ ID NO: 3493 - protein, 18 aa, Homo sapiens
KYLGNATAIFFLPDEGKL

SEQ ID NO: 3494 - protein, 16 aa, Homo sapiens
RVLPVNVTDYCQLVRY

SEQ ID NO: 3495 - protein, 23 aa, Homo sapiens
RCDSGFALDSEERNCTDIDECRI

SEQ ID NO: 3496 - protein, 20 aa, Homo sapiens
KAWGTPCEMCPAVNTSEYKI

SEQ ID NO: 3497 - protein, 22 aa, Homo sapiens
RNYYADNQTCDGELLFNMTKKM

SEQ ID NO: 3498 - protein, 15 aa, Homo sapiens
RRPYVSYVNNSIARN

SEQ ID NO: 3499 - protein, 20 aa, Homo sapiens
ISAQYANFTGCISNAYFTRV

SEQ ID NO: 3500 - protein, 20 aa, Homo sapiens
RDAVRNLTEVVPQLLDQLRT

SEQ ID NO: 3501 - protein, 17 aa, Homo sapiens
RNLQVYNATSNSLTVKW

SEQ ID NO: 3502 - protein, 18 aa, Homo sapiens
PLTDQGTTLYLNVTDLKT

SEQ ID NO: 3503 - protein, 11 aa, Homo sapiens
REEQYNSTYRV

SEQ ID NO: 3504 - protein, 15 aa, Homo sapiens
KTKPREEQYNSTYRV

SEQ ID NO: 3505 - protein, 11 aa, Homo sapiens
REEQYNSTFRV

SEQ ID NO: 3506 - protein, 15 aa, Homo sapiens
KTKPREEQYNSTFRV

SEQ ID NO: 3507 - protein, 22 aa, Homo sapiens
KFNLTETSEAEIHQSFQHLLRT

SEQ ID NO: 3508 - protein, 16 aa, Homo sapiens
RLHNKLLPNVTTVERN

SEQ ID NO: 3509 - protein, 13 aa, Homo sapiens
RGLNVTLSSTGRN

SEQ ID NO: 3510 - protein, 18 aa, Homo sapiens
RFSDGLESNSSTQFEVKK

SEQ ID NO: 3511 - protein, 18 aa, Homo sapiens
SEGSSNTTEATSGSGVRG

SEQ ID NO: 3512 - protein, 21 aa, Homo sapiens
KMSIQGCVAQPSSFLLNHTRQ

SEQ ID NO: 3513 - protein, 25 aa, Homo sapiens
RAVCGGVLVHPQWVLTAAHCIRNKS

SEQ ID NO: 3514 - protein, 26 aa, Homo sapiens
RFVNVTVTPEDQCRPNNVCTGVLTRR

SEQ ID NO: 3515 - protein, 19 aa, Homo sapiens
HVSNVTVNYNVTVERMNRM

SEQ ID NO: 3516 - protein, 13 aa, Homo sapiens
KYKNNSDISSTRG

SEQ ID NO: 3517 - protein, 23 aa, Homo sapiens
RGLTFQQNASSMCVPDQDTAIRV

SEQ ID NO: 3518 - protein, 23 aa, Mus musculus
RIVGGTNASLGEWPWQVSLQVKL

SEQ ID NO: 3519 - protein, 21 aa, Mus musculus
KLQTPLNYTEFQKPICLPSKA

SEQ ID NO: 3520 - protein, 28 aa, Mus musculus
RCAMDLGVNYLGTVNVTHTGIQCQLWRS

SEQ ID NO: 3521 - protein, 28 aa, Mus musculus
RWVLTAAHCILYPPWDKNFTENDLLVRI

SEQ ID NO: 3522 - protein, 23 aa, Mus musculus
KSNETALSPDLNQTSPSMSTDRS

SEQ ID NO: 3523 - protein, 24 aa, Mus musculus
EITGSPVSNLSAHIFSNLSSLEKL

SEQ ID NO: 3524 - protein, 21 aa, Mus musculus
RDGSDSAAMVYNSSQEWGLRS

SEQ ID NO: 3525 - protein, 12 aa, Mus musculus
RDCVSCQNVSRG

SEQ ID NO: 3526 - protein, 26 aa, Mus musculus
RDIVQNVFMSNMSMDLQSHPSSCPKC

SEQ ID NO: 3527 - protein, 13 aa, Mus musculus
KDTLSINATNIKH

SEQ ID NO: 3528 - protein, 22 aa, Mus musculus
KEQETCLAPELEHGNYSTTQRT

SEQ ID NO: 3529 - protein, 13 aa, Mus musculus
RTYENGSSVEYRC

SEQ ID NO: 3530 - protein, 16 aa, Mus musculus
RHNQSCEWCQTLAVRS

SEQ ID NO: 3531 - protein, 18 aa, Mus musculus
KSGPPANYTLWYTVMSKD

SEQ ID NO: 3532 - protein, 19 aa, Mus musculus
KLIPHLEKPLQNFTLCFRT

SEQ ID NO: 3533 - protein, 18 aa, Mus musculus
LIPHLEKPLQNFTLCFRT

SEQ ID NO: 3534 - protein, 11 aa, Mus musculus
REEQFNSTFRS

SEQ ID NO: 3535 - protein, 19 aa, Mus musculus
KLIPHLEKPLQNFTLCFRT

SEQ ID NO: 3536 - protein, 15 aa, Mus musculus
KNLFLNHSETASAKD

SEQ ID NO: 3537 - protein, 25 aa, Mus musculus
KNLTSPVGVQPILNEHTFCAGLTKY

SEQ ID NO: 3538 - protein, 21 aa, Mus musculus
RSLPPGLFSTSANLSTLVLRE

SEQ ID NO: 3539 - protein, 20 aa, Mus musculus
KDNSCVDPPHVPNATIVTRT

SEQ ID NO: 3540 - protein, 18 aa, Mus musculus
RVLYLPAYNCTLRPVSKR

SEQ ID NO: 3541 - protein, 19 aa, Mus musculus
RRVLYLPAYNCTLRPVSKR

SEQ ID NO: 3542 - protein, 14 aa, Homo sapiens
LADLTQGEDQYYLR

SEQ ID NO: 3543 - protein, 10 aa, Homo sapiens
LHEITDETFR

SEQ ID NO: 3544 - protein, 21 aa, Artificial Sequence
  synthetic isotope labeled peptide
IVGGTDSSWGEWPWQVSLQVK

SEQ ID NO: 3545 - protein, 14 aa, Artificial Sequence
  synthetic isotope labeled peptide
AQLLQGLGFDLTER

SEQ ID NO: 3546 - protein, 21 aa, Artificial Sequence
  synthetic isotope labeled peptide
IYSDHSALESLALIPLQAPLK

SEQ ID NO: 3547 - protein, 14 aa, Artificial Sequence
  synthetic isotope labeled peptide
LADLTQGEDQYYLR

SEQ ID NO: 3548 - protein, 19 aa, Artificial Sequence
  synthetic isotope labeled peptide
LGSFEGLVDLTFIHLQHNR

SEQ ID NO: 3549 - protein, 24 aa, Artificial Sequence
  synthetic isotope labeled peptide
SVQEIQATFFYFTPDKTEDTIFLR

SEQ ID NO: 3550 - protein, 13 aa, Artificial Sequence
  synthetic isotope labeled peptide
LPPGLLADFTLLR

SEQ ID NO: 3551 - protein, 22 aa, Artificial Sequence
  synthetic isotope labeled peptide
FHDVSESTHWTPFLDASVHYIR

SEQ ID NO: 3552 - protein, 8 aa, Artificial Sequence
  synthetic isotope labeled peptide
DGSLFAFR

SEQ ID NO: 3553 - protein, 23 aa, Artificial Sequence
  synthetic isotope labeled peptide
DNATVHEQVGGPSLTSDLQAQSK

SEQ ID NO: 3554 - protein, 11 aa, Artificial Sequence
  synthetic isotope labeled peptide
GELDTSIFSSR

SEQ ID NO: 3555 - protein, 11 aa, Artificial Sequence
  synthetic isotope labeled peptide
GELDTSIFSSR

SEQ ID NO: 3556 - protein, 20 aa, Artificial Sequence
  synthetic isotope labeled peptide
MAWPEDHVFISTPSFDYTGR

SEQ ID NO: 3557 - protein, 16 aa, Artificial Sequence
  synthetic isotope labeled peptide
FNPGAESVVLSDSTLK

SEQ ID NO: 3558 - protein, 20 aa, Artificial Sequence
  synthetic isotope labeled peptide
ISALGLPTDLTHILLFGMGR

SEQ ID NO: 3559 - protein, 10 aa, Artificial Sequence
  synthetic isotope labeled peptide
CFLGDGTGYR

SEQ ID NO: 3560 - protein, 19 aa, Artificial Sequence
  synthetic isotope labeled peptide
SVVAPATDGGLDLTSTFLR

SEQ ID NO: 3561 - protein, 14 aa, Artificial Sequence
  synthetic isotope labeled peptide
WFSAGLASDSSWLR

SEQ ID NO: 3562 - protein, 26 aa, Artificial Sequence
  synthetic isotope labeled peptide
GHFIYKDVSEDLPLPTFSPTLLGDSR

SEQ ID NO: 3563 - protein, 13 aa, Artificial Sequence
  synthetic isotope labeled peptide
EVYPWYDLTVEAK

SEQ ID NO: 3564 - protein, 18 aa, Artificial Sequence
  synthetic isotope labeled peptide
KDFEDLYTPVDGSIVIVR

SEQ ID NO: 3565 - protein, 9 aa, Artificial Sequence
  synthetic isotope labeled peptide
LDVDQALDR

SEQ ID NO: 3566 - protein, 10 aa, Artificial Sequence
  synthetic isotope labeled peptide
TMFPDLTDVR

SEQ ID NO: 3567 - protein, 12 aa, Artificial Sequence
  synthetic isotope labeled peptide
LVPHMDVSAVEK

SEQ ID NO: 3568 - protein, 16 aa, Artificial Sequence
  synthetic isotope labeled peptide
GCDDSDVLAVAGFALR

SEQ ID NO: 3569 - protein, 16 aa, Artificial Sequence
  synthetic isotope labeled peptide
VLYLAAYDCTLRPVSK

SEQ ID NO: 3570 - protein, 12 aa, Artificial Sequence
  synthetic isotope labeled peptide
DDYTKAEEILSR

SEQ ID NO: 3571 - protein, 16 aa, Artificial Sequence [sequence omitted]

SEQ ID NO: 3572 - protein, 19 aa, Artificial Sequence
  synthetic isotope labeled peptide
LQAPLDYTEFQKPICLPSK

SEQ ID NO: 3573 - protein, 10 aa, Artificial Sequence
  synthetic isotope labeled peptide
DGTAVCATNR

SEQ ID NO: 3574 - protein, 13 aa, Artificial Sequence
  synthetic isotope labeled peptide
YDFDSSMLYSTAK

SEQ ID NO: 3575 - protein, 10 aa, Artificial Sequence
  synthetic isotope labeled peptide
SYDVTSVLFR

SEQ ID NO: 3576 - protein, 12 aa, Artificial Sequence
  synthetic isotope labeled peptide
IDVNSWIEDFTK

SEQ ID NO: 3577 - protein, 8 aa, Artificial Sequence
  synthetic isotope labeled peptide
DGTLVAFR

SEQ ID NO: 3578 - protein, 18 aa, Artificial Sequence
  synthetic isotope labeled peptide
DGSGAVFPVAGADVQTLR

SEQ ID NO: 3579 - protein, 14 aa, Artificial Sequence
  synthetic isotope labeled peptide
NYHQPAILDSSALR

SEQ ID NO: 3580 - protein, 11 aa, Artificial Sequence
  synthetic isotope labeled peptide
ETHLETDFTLK

SEQ ID NO: 3581 - protein, 12 aa, Artificial Sequence
  synthetic isotope labeled peptide
FQLLDFSSSELK

SEQ ID NO: 3582 - protein, 21 aa, Artificial Sequence
  synthetic isotope labeled peptide
SHAASDAPEDLTLLAETADAR

SEQ ID NO: 3583 - protein, 17 aa, Artificial Sequence
  synthetic isotope labeled peptide
IAVQFGPGFSWIADFTK

SEQ ID NO: 3584 - protein, 8 aa, Artificial Sequence
  synthetic isotope labeled peptide
WQMDFTVR

SEQ ID NO: 3585 - protein, 10 aa, Artificial Sequence
  synthetic isotope labeled peptide
LHEITDETFR

SEQ ID NO: 3586 - protein, 11 aa, Artificial Sequence
  synthetic isotope labeled peptide
FDSTEYQVVTR

SEQ ID NO: 3587 - protein, 30 aa, Artificial Sequence
  synthetic isotope labeled peptide
QLAHQSDSTNIFFSPVSIATAFAMLSLGTK

SEQ ID NO: 3588 - protein, 17 aa, Artificial Sequence
  synthetic isotope labeled peptide
QGSLGLQYDASQEWDLR

SEQ ID NO: 3589 - protein, 19 aa, Artificial Sequence
  synthetic isotope labeled peptide
IQMLSFAGEPLPQDSSMAR

SEQ ID NO: 3590 - protein, 15 aa, Artificial Sequence
  synthetic isotope labeled peptide
SDFSQTMLFQADTTR

SEQ ID NO: 3591 - protein, 15 aa, Artificial Sequence
  synthetic isotope labeled peptide
FVGTPEVDQTTLYQR

SEQ ID NO: 3592 - protein, 18 aa, Artificial Sequence
  synthetic isotope labeled peptide
TLSDVPSAAPQDLSLEVR

SEQ ID NO: 3593 - protein, 11 aa, Homo sapiens
FDSTEYQVVTR

SEQ ID NO: 3594 - protein, 13 aa, Homo sapiens
YDFNSSMLYSTAK

SEQ ID NO: 3595 - protein, 14 aa, Homo sapiens
AQLLQGLGFNLTER

SEQ ID NO: 3596 - protein, 16 aa, Homo sapiens
FNPGAESVVLSNSTLK

SEQ ID NO: 3597 - protein, 14 aa, Homo sapiens
LANLTQGEDQYYLR

SEQ ID NO: 3598 - protein, 18 aa, Homo sapiens
TLSDVPSAAPQNLSLEVR

SEQ ID NO: 3599 - protein, 18 aa, Homo sapiens
KDFEDLYTPVNGSIVIVR

SEQ ID NO: 3600 - protein, 19 aa, Homo sapiens
LGSFEGLVNLTFIHLQHNR

SEQ ID NO: 3601 - protein, 21 aa, Homo sapiens
IYSNHSALESLALIPLQAPLK

SEQ ID NO: 3602 - protein, 23 aa, Homo sapiens
NNATVHEQVGGPSLTSDLQAQSK

What is claimed is:

1. A method for identifying glycopolypeptides in a serum or plasma sample, comprising:
(a) derivatizing glycopolypeptides in said sample;
(b) immobilizing said derivatized sample glycopolypeptides to a solid support;
(c) cleaving said immobilized sample glycopolypeptides, thereby releasing non-glycosylated peptide fragments and retaining immobilized sample glycopeptide fragments;
(d) labeling said immobilized sample glycopeptide fragments with an isotope tag;
(e) releasing said sample glycopeptide fragments from said solid support, thereby generating released sample glycopeptide fragments;
(f) adding to said released sample glycopeptide fragments a plurality of standard peptides selected from peptides containing the glycosylation sites referenced as SEQ ID NOS: 1-3482, wherein said standard peptides correspond to peptides derivatized as in step (a), cleaved as in step (c), and released as in step (e), and wherein said standard peptides are differentially labeled with a corresponding isotope tag as used in step (d);
(g) analyzing said released sample glycopeptide fragments using mass spectrometry; and
(h) identifying released sample glycopeptide fragments that correspond to standard peptides added in step (f).

2. The method of claim 1, further comprising quantifying the amount of said sample glycopeptide fragments identified in step (h).

3. The method of claim 1, wherein said solid support comprises a hydrazide moiety.

4. The method of claim 1, wherein said glycopeptides are released from said solid support using a glycosidase.

5. The method of claim 4, wherein said glycosidase is an N-glycosidase or an O-glycosidase.

6. The method of claim 5, wherein said glycopeptides are released from said solid using sequential addition of N-glycosidase and O-glycosidase.

7. The method of claim 1, wherein said glycopeptides are released from said solid support using chemical cleavage.

8. The method of claim 1, wherein said glycopolypeptides are oxidized with periodate.

9. The method of claim 1, wherein said glycopolypeptides are cleaved with a protease.

10. The method of claim 9, wherein said glycopolypeptides are cleaved with trypsin.

11. A method for identifying glycopolypeptides in a serum or plasma sample, comprising:
(a) immobilizing said sample glycopolypeptides to a solid support;
(b) cleaving said immobilized sample glycopolypeptides, thereby releasing non-glycosylated peptide fragments and retaining immobilized sample glycopeptide fragments;
(c) labeling said immobilized sample glycopeptide fragments with an isotope tag;
(d) releasing said sample glycopeptide fragments from said solid support, thereby generating released sample glycopeptide fragments;
(e) adding to said released sample glycopeptide fragments a plurality of standard peptides selected from peptides containing the glycosylation sites referenced as SEQ ID NOS: 1-3482, wherein said standard peptides correspond to peptides cleaved as in step (b), and released as in step (d), and wherein said standard peptides are differentially labeled with a corresponding isotope tag as used in step (c);
(f) analyzing said released sample glycopeptide fragments using mass spectrometry; and
(g) identifying released sample glycopeptide fragments that correspond to standard peptides added in step (e).

12. The method of claim 11, further comprising quantifying the amount of said sample glycopeptide fragments identified in step (g).

13. The method of claim 11, wherein said solid support comprises a hydrazide moiety.

14. The method of claim 11, wherein said glycopeptides are released from said solid support using a glycosidase.

15. The method of claim 14, wherein said glycosidase is an N-glycosidase or an O-glycosidase.

16. The method of claim 15, wherein said glycopeptides are released from said solid using sequential addition of N-glycosidase and O-glycosidase.

17. The method of claim 11, wherein said glycopeptides are released from said solid support using chemical cleavage.

18. The method of claim 11, wherein said glycopolypeptides are oxidized with periodate.

19. The method of claim 11, wherein said glycopolypeptides are cleaved with a protease.

20. The method of claim 19, wherein said glycopolypeptides are cleaved with trypsin.

21. A method for identifying and quantifying glycopolypeptides in a control serum or plasma sample, comprising:
(a) derivatizing glycopolypeptides in a said sample;
(b) immobilizing said derivatized sample glycopolypeptides to a solid support;
(c) cleaving said immobilized sample glycopolypeptides, thereby releasing non-glycosylated peptide fragments and retaining immobilized sample glycopeptide fragments;
(d) labeling said immobilized sample glycopeptide fragments with an isotope tag;
(e) releasing said sample glycopeptide fragments from said solid support, thereby generating released sample glycopeptide fragments;
(f) adding to said released sample glycopeptide fragments a plurality of standard peptides selected from peptides containing the glycosylation sites referenced as SEQ ID NOS: 1-3482, wherein said standard peptides correspond to peptides derivatized as in step (a), cleaved as in step (c), and released as in step (e), and wherein said standard peptides are differentially labeled with a corresponding isotope tag as used in step (d);
(g) analyzing said released sample glycopeptide fragments using mass spectrometry;
(h) identifying released sample glycopeptide fragments that correspond to standard peptides added in step (f); and
(i) quantifying the amount of said sample glycopeptide fragments identified in step (h).

22. The method of claim 21, wherein the control serum or plasma sample is normal serum or plasma.

23. The method of claim 21, wherein said solid support comprises a hydrazide moiety.

24. The method of claim 21, wherein said glycopeptides are released from said solid support using a glycosidase.

25. The method of claim 24, wherein said glycosidase is an N-glycosidase or an O-glycosidase.

26. The method of claim 25, wherein said glycopeptides are released from said solid using sequential addition of N-glycosidase and O-glycosidase.

27. The method of claim 21, wherein said glycopeptides are released from said solid support using chemical cleavage.

28. The method of claim 21, wherein said glycopolypeptides are oxidized with periodate.

29. The method of claim 21, wherein said glycopolypeptides are cleaved with a protease.

30. The method of claim 29, wherein said glycopolypeptides are cleaved with trypsin.

31. A method for identifying one or more diagnostic markers for a disease, comprising:
(a) derivatizing glycopolypeptides in a serum or plasma sample from an individual having a disease;
(b) immobilizing said derivatized sample glycopolypeptides to a solid support;
(c) cleaving said immobilized sample glycopolypeptides, thereby releasing non-glycosylated peptide fragments and retaining immobilized sample glycopeptide fragments;
(d) labeling said immobilized sample glycopeptide fragments with an isotope tag;
(e) releasing said sample glycopeptide fragments from said solid support, thereby generating released sample glycopeptide fragments;
(f) adding to said released sample glycopeptide fragments a predetermined amount of a plurality of standard peptides selected from peptides containing the glycosylation sites referenced as SEQ ID NOS: 1-3482, wherein said standard peptides correspond to peptides derivatized as in step (a), cleaved as in step (c), and released as in step (e), and wherein said standard peptides are differentially labeled with a corresponding isotope tag as used in step (d);
(g) analyzing said released sample glycopeptide fragments using mass spectrometry;
(h) identifying released sample glycopeptide fragments that correspond to standard peptides added in step (f);
(i) quantifying the amount of said sample glycopeptide fragments identified in step (h); and
(j) comparing the amount of said sample glycopeptide fragments determined in step (i) to the amount of the same glycopeptide fragments determined in a normal serum or plasma sample.

32. The method of claim 31, wherein said solid support comprises a hydrazide moiety.

33. The method of claim 31, wherein said glycopeptides are released from said solid support using a glycosidase.

34. The method of claim 33, wherein said glycosidase is an N-glycosidase or an O-glycosidase.

35. The method of claim 34, wherein said glycopeptides are released from said solid using sequential addition of N-glycosidase and O-glycosidase.

36. The method of claim 31, wherein said glycopeptides are released from said solid support using chemical cleavage.

37. The method of claim 31, wherein said glycopolypeptides are oxidized with periodate.

38. The method of claim 31, wherein said glycopolypeptides are cleaved with a protease.

39. The method of claim 38, wherein said glycopolypeptides are cleaved with trypsin.

40. The method of claim 31, wherein the disease is cancer.

41. A composition comprising a plurality of peptides containing the glycosylation sites referenced as SEQ ID NOS: 1-3482, wherein said peptides each correspond to peptide fragments derived by cleavage of polypeptides using the same cleavage reagent.

42. The composition of claim 41, wherein said cleavage reagent is a protease.

43. The composition of claim 42, wherein said protease is trypsin.

44. A kit comprising a plurality of peptides containing the glycosylation sites sh referenced as SEQ ID NOS: 1-3482, wherein said peptides each correspond to peptide fragments derived by cleavage of polypeptides using the same cleavage reagent.

45. The kit of claim 44, further comprising a pair of differentially labeled isotope tags.

46. The kit of claim 44, further comprising the cleavage reagent corresponding to said peptide fragments.

47. The kit of claim 46, wherein said cleavage reagent is a protease.

48. The kit of claim 47, wherein said protease is trypsin.

49. The kit of claim 44, further comprising a hydrazide resin.

50. The kit of claim 44, further comprising a glycosidase.
